(19) United States
(12) Patent Application Publication
(10) Pub. No.: US 2005/0266459 A1
(43) Pub. Date: Dec. 1, 2005

(54) Nucleic acid probes and nucleic acid analog probes

(76) Inventors: Tim Svenstrup Poulsen, Horsholm (DK); Kirsten Vang Nielsen, Bronshoj (DK)

Correspondence Address: FINNEGAN, HENDERSON, FARABOW, GARRETT & DUNNER;LLP, 901 NEW YORK AVENUE, NW, WASHINGTON, DC, 20001-4413, US

(21) Appl. No.: 11/121,086

(22) Filed: May 4, 2005

Related U.S. Application Data
(60) Provisional application No. 60/567,570, filed on May 4, 2004.
(60) Provisional application No. 60/567,440, filed on May 4, 2004.

(51) Int. Cl. C12Q 1/68; C07H 21/04

(52) U.S. Cl. 435/6; 536/24.3

(57) ABSTRACT

The present invention relates to probes for use in various applications. For example, these probes may be used to detect, quantify, identify, or analyze nucleic acid molecules or other molecules that bind to the probes. The invention also encompasses compositions and kits containing the probes and methods of using the probes.

[0001] This application claims priority to U.S. Provisional Patent Application Nos. 60/567,570 and 60/567,440, both of which were filed May 4, 2004, and which are incorporated herein by reference in their entirety.

[0002] The instant application contains a “lengthy” Sequence Listing which has been submitted via CD-R in lieu of a printed paper copy, and is hereby incorporated by reference in its entirety. Said CD-R, recorded on May 3, 2005, are labeled CRF, “Copy 1” and “Copy 2”, respectively, and each contains only one identical 21.4 MB file (91386us.APP).

[0003] The present invention relates to probes for use in various applications. For example, these probes may be used to detect, quantify, identify, or analyze nucleic acid molecules or other molecules that bind to the probes. The invention also encompasses compositions and kits containing the probes and methods of using the probes.

[0004] Probe-based assays are useful in the detection, quantitation and analysis of nucleic acids by hybridizing a probe to a nucleic acid sample. Probes have long been used to analyze samples for the presence of nucleic acid from a bacteria, fungi, virus or other organism (See for example; U.S. Pat. Nos. 4,851,330, 5,288,611, 5,567,587, 5,601,984 and 5,612,183). Probe-based assays are also useful in examining genetically-based clinical conditions of interest, as discussed below.

[0005] There are several types of probes that may be used for hybridizing to a nucleic acid sample (See generally Szeles, Acta Microbiol. Immunol. Hungarica, 49:69-80 (2002)). These probes include short sequences of genomic DNA or cDNA, whole chromosome paints, chromosome repeats, and whole genomes. In the case of genomic probes, frequently repeated sequences in mammalian genomes have relatively little evolutionary conservation. Thus, total nuclear or genomic DNA can be used as a species-specific probe. Chromosome paints are collections of DNA sequences derived from a single chromosome type and can identify that specific chromosome type in metaphase and interphase nuclei. Different chromosomal types also have unique repeated sequences that may be targeted for probe hybridization (See Cremer et al., Hum. Genet., 74:346-52 (1986)). These chromosomal repeat probes have been cloned for more than two thirds of the human chromosome types (See Szeles, Acta Microbiol. Immunol. Hungarica, 49:69-80 (2002)). Large insert probes that target unique single-copy sequences are another example of a probe type that may be used in hybridization assays. These probes may be in cosmids, bacterial artificial chromosomes (BACs), P1 diverted artificial chromosomes (PACs), or yeast artificial chromosomes (YACs). With these large probes, the hybridization efficiency is inversely proportional to the probe size. Nonetheless, probes as small as 2 kb have been used (See Id.).

[0006] Detection of nucleic acid sequences by in situ hybridization, which involves a fundamental process in molecular biology, has been applied for several years (Speel, Histochem. Cell Biol., 112:89-113 (1999)). Sequence differences as subtle as a single base (point mutation) in very short oligomers (<10 base pairs “bp”) can be sufficient to enable the discrimination of the hybridization to complementary nucleic acid target sequences as compared with non-target sequences. Nonetheless, probes of greater than 10 bp in length are generally required to obtain the sequence diversity necessary to correctly identify a unique organism or clinical condition of interest. The ability to discriminate between closely related sequences is inversely proportional to the length of the hybridization probe because the difference in thermal stability decreases between wild type and mutant complexes as the probe length increases. In situ hybridization began by using probes that were radioactively labeled. Currently, however, several alternate detectable labels are available, as discussed below.

[0007] Fluorescence in-situ hybridization (“FISH”) is one example of a probe-based assay in which the probes of the invention may be used. FISH was initially developed in the late 1970s (Rudkin and Stollar, Nature, 265:472-73 (1977)). The technique generally entails preparing a cytological sample, labeling probes, denaturing target chromosomes and the probe, hybridizing the probe to the target sequence, and detecting a signal. Typically, the hybridization reaction fluorescently stains the target sequences so that their location, size, or number can be determined using fluorescence microscopy, flow cytometry or other suitable instrumentation. In mammalian cells, chromosomes are arranged in matching pairs. Each chromosome in the pair is a sister chromosome. DNA sequences ranging from whole genomes down to several kilobases can be studied using current hybridization techniques in combination with commercially available instrumentation.

[0008] FISH-based staining is sufficiently distinct such that the hybridization signals can be seen both in metaphase spreads and in interphase nuclei. Single and multicolor FISH, using probes, have been applied to different clinical applications generally known as molecular cytogenetics, including prenatal diagnosis, leukemia diagnosis, and tumor cytogenetics. In general, the FISH technique has several advantages including ease of use, rapid results, reduced background in comparison with the radioactive labels that preceded fluorescent labels, and high sensitivity.

[0009] The FISH technique has several applications in the clinical setting. These applications include, for example, detection of chromosomal aneuploidy in prenatal diagnoses, hematological cancers, and solid tumors; detection of gene abnormalities such as oncogene amplifications, gene deletions, or gene fusions; chromosomal structural abnormalities such as translocations, duplications, insertions, or inversions; detection of contiguous gene syndromes such as microdeletion syndrome; monitoring the genetic effect of therapy; detection of viral nucleic acids in somatic cells and viral integration sites in chromosomes; gene mapping; and cell cycle analysis (Luke and Shepelsky, Cell Vision 5:49-53 (1998)).

[0010] With regard to applications in cancer research, FISH analysis has lead to the identification of several deletion-prone regions in human chromosomes that have been correlated with cancers in various tissues including breast, kidney, lung, uterus, testis, and ovaries (Szeles, Acta Microbiol. Immunol. Hungarica, 49:69-80 (2002)). FISH analysis has also been used to analyze tumor-suppressor genes and DNA repair genes.

[0011] There are several variations of the FISH technique those in the art have used to analyze chromosomes (Luke and Shepelsky, Cell Vision 5:49-53 (1998)). For example, in comparative genomic hybridization (CGH) whole genomes are stained and compared to normal reference genomes for the detection of regions with aberrant copy number. FISH is ideally suited for the simultaneous detection of multiple hybridization probes because of the availability of spectrally distinct fluorochromes. In addition, FISH allows the accurate quantitation of hybridization signals. These characteristics paved the way for multicolor applications, which evolved to the simultaneous hybridization of 24 or even more DNA probes for the FISH-based karyotyping chromosomes. For such applications, several techniques, including multiplex FISH (m-FISH; Speicher et al., Nat. Genet., 12:368-75 (1996)), spectral karyotyping (SKY; Schröck et al., Science, 273:494-97 (1996)), combined binary ration labeling (COBRA; Tanke et al., Eur. J. Hum. Genet., 7:2-11 (1999)), or color-changing karyotyping (Henegariu et al., Nat. Genet., 23:263-64 (1999)) have been developed. Moreover, FISH-based banding technologies, such as cross-species color banding (Müller et al., Hum. Genet., 100:271-78 (1997)) or high resolution multicolor banding (Chudoba et al., Cytogenet. Cell Genet., 84:156-60 (1999)) were developed for karyotyping and to facilitate the identification of intrachromosomal rearrangements. Thus, a variety of different multicolor-FISH technologies are available to the skilled artisan. The basic principles of multicolor-FISH were reviewed recently (Lichter, Trends Genet., 13:475-79 (1997)). When used on abnormal material, the probes will stain the aberrant chromosomes thereby deducing the normal chromosomes from which they are derived (Macville M et al., Histochem Cell Biol., 108:299-305 (1997)). Specific DNA sequences, such as the ABL gene, can be reliably stained using probes of only 15 kb (Tkachuk et al., Science, 250: 559-62 (1990)). Telomeric multiplex FISH (TM-FISH) allows for simultaneous hybridization of several subtelomeric probes on one sample slide (Henegariu et al., Lab. Invest., 81:483-91 (2001)). These subtelomeric probes are between 100 kb and 1 Mb from the end of the chromosomes.

[0012] SKY uses charge coupled device (CCD) imaging and Fourier spectroscopy to assess the spectrum of fluorescent wavelengths for each pixel scanned, assigning a specific pseudocolor depending on the spectrum identified (Schrock et al. Science, 273:494-497 (1996)). See also the E.C.A. Newsletter for a general description of SKY, available at http://www.biologia.uniba.it/eca/NEWSLETTERS/NS-7/02-Multiplex-FISH.html. In cases of chromosomal aberrations involving small genomic segments, SKY analysis may require supplemental FISH analysis using smaller, subtelomeric probes or chromosome painting probes, (Fan et al., Genetic Testing, 4:9-14 (2000); Hilgenfeld et al., British J. Haematol., 113:305-17 (2001)).

[0013] Split-signal FISH (ssFISH) detects changes in chromosomal structure by using two probes, each of which is labeled by a different detectable label. The detectable labels should be distinguishable from one another. Each probe binds to the chromosome on either side of a suspected breakpoint in the chromosome. In a normal chromosome, the two probes will be proximal enough to each other such that the combined signal of their different labels forms a signal that is different from each label alone. Thus, a normal chromosomal sample will contain only the combined or fused signal of the two probes on the sister chromosomes. In an abnormal sample, where one sister chromosome has broken at the suspected break point, the fused signal will remain on the normal sister chromosome. On the broken chromosome, one probe migrates to a completely different location, where the individual signal of that translocated probe becomes apparent. The other individual probe remains on the split chromosome and, because it is no longer proximal to the other probe, emits its individual signal as well. In sum, because of the break in chromosomal structure, the two probes are no longer juxtaposed, allowing the fused signal they cause together to split into the individual signals for each probe. See generally WO 98/51817.

[0014] Fusion-signal FISH is similar to ssFISH in that two probes with two different, distinguishable labels are used such that proximity of the two labels produces a new fused signal. The two methods differ in that for fusion-signal FISH, the two probes bind to two different locations that are suspected to become proximal to each other as a result of a chromosomal translocation. Thus, in a normal sample, only signals from the individual probes are present and no fused signal appears. In an abnormal sample, where a piece of one chromosome has attached to another chromosome, the normal chromosomes in each of the two pairs involved will still emit each of the individual probe signals. In the abnormal chromosome, in which the probes are now proximal due to the translocation, the fused signal appears. For a general discussion of fusion-signal FISH, see Arnoldus et al., Cytogenet. Cell Genet., 54:108-11 (1990). Similar results can be obtained without the use of fluorescent microscopy. Such methods include in situ hybridization (ISH) and radioactive in situ hybridization or chromogenic in situ hybridization (CISH). See Tanner et al., Am. J. Pathol., 157:1467-72 (2000).

[0015] The invention provides a series of probes that may be used in the above-described assays or in other probe-based assays. For a general discussion of exemplary alternate probe-based assays see Veltman et al., Biotechniques, 35:1066-70 (2003).

### SUMMARY OF THE INVENTION

[0016] The invention relates to probes that may be used in a variety of probe-based assays. In one embodiment, the probes are identical to the nucleic acid sequences set forth in SEQ ID NOS:1-107. In another embodiment, the probes are substantially identical to the nucleic acid sequences set forth in SEQ ID NOS:1-107. In yet another embodiment, the probes are labeled with a detectable label. In another embodiment, the probes are not labeled.

[0017] In another embodiment, the probe flanks the breakpoint region of a chromosome. In another embodiment, the probe partially overlaps the breakpoint region of a chromosome. In another embodiment, the probe extends past the breakpoint region of a chromosome.

[0018] In yet another embodiment, unlabeled probes are used to remove complementary labeled probes that are at a chromosomal breakpoint, thus producing labeled break point probes. For example, two differentially labeled probes extending into a chromosome breakpoint region may overlap each other. As shown in FIG. 1, when these labeled probes are used in an assay to detect a translocation, they may mask the presence of the translocation due to this overlap in probe sequence. Thus, where the differentially labeled probes should give two distinguishable signals for a translocation, the overlapping probes may instead give a signal that combines the two labels. A combined signal may falsely indicate a duplication of chromosomal sequence, rather than the actual translocation that is present in the chromosome. This problem can be solved by adding an excess amount of a “blocking probe,” which competes with and blocks the labeled probes' binding to the breakpoint region, thereby generating the correct signal. See FIG. 1. Examples of blocking probes include, but are not limited to, a nucleic acid sequence comprising a sequence that is complementary to the labeled probes, a nucleic acid sequence that binds to the labeled probes under low stringency conditions, or a nucleic acid analog probe that binds to the labeled probes under low stringency conditions. A blocking probe may be prepared from various vectors including, but not limited to, a plasmid, a cosmid, a PAC, a BAC, or a YAC. A blocking probe may be unlabeled or may comprise a detectable labeled.

[0019] In a further embodiment, the nucleic acid probe is selected from (a) a nucleic acid comprising the nucleotide sequence substantially as set out in SEQ ID NO:1, SEQ ID NO:2, SEQ ID NO:3, SEQ ID NO:4, SEQ ID NO:5, SEQ ID NO:6, SEQ ID NO:7, SEQ ID NO:8, SEQ ID NO:9, SEQ ID NO:10, SEQ ID NO:11, SEQ ID NO:12, SEQ ID NO:13, SEQ ID NO:14, SEQ ID NO:15, SEQ ID NO:16, SEQ ID NO:17, SEQ ID NO:18, SEQ ID NO:19, SEQ ID NO:20, SEQ ID NO:21, SEQ. ID NO. 22, SEQ ID NO:23, SEQ ID NO:24, SEQ ID NO:25, SEQ ID NO:26, SEQ ID NO:27, SEQ ID NO:28, SEQ ID NO:29, SEQ ID NO:30, SEQ ID NO:31, SEQ ID NO:32, SEQ ID NO:33, SEQ ID NO:34, SEQ ID NO:35, SEQ ID NO:36, SEQ ID NO:37, SEQ ID NO:38, SEQ ID NO:39, SEQ ID NO:40, SEQ ID NO:41, SEQ ID NO:42, SEQ ID NO:43, SEQ-ID NO:44, SEQ ID NO:45, SEQ ID NO:46, SEQ ID NO:47, SEQ ID NO:48, SEQ ID NO:49, SEQ ID NO:50, SEQ ID NO:51, SEQ ID NO:52, SEQ ID NO:53, SEQ ID NO:54, SEQ ID NO:55, SEQ ID NO:56, SEQ ID NO:57, SEQ ID NO:58, SEQ ID NO:59, SEQ ID NO:60, SEQ ID NO:61, SEQ ID NO:62, SEQ ID NO:63, SEQ ID NO:64, SEQ ID NO:65, SEQ ID NO:66, SEQ ID NO:67, SEQ ID NO:68, SEQ ID NO:69, SEQ ID NO:70, SEQ ID NO:71, SEQ ID NO:72, SEQ ID NO:73, SEQ ID NO:74, SEQ ID NO:75, SEQ ID NO:76, SEQ ID NO:77, SEQ ID NO:78, SEQ ID NO:79, SEQ ID NO:80, SEQ ID NO:81, SEQ ID NO:82, SEQ ID NO:83, SEQ ID NO:84, SEQ ID NO:85, SEQ ID NO:86, SEQ ID NO:87, SEQ ID NO:88, SEQ ID NO:89, SEQ ID NO:90, SEQ ID NO:91, SEQ ID NO:92, SEQ ID NO:93, SEQ ID NO:94, SEQ ID NO:95, SEQ ID NO:96, SEQ ID NO:97, SEQ ID NO:98, SEQ ID NO:99, SEQ ID NO:100, SEQ ID NO:101, SEQ ID NO:102, SEQ ID NO:103, SEQ ID NO:104, SEQ ID NO:105, SEQ ID NO:106, or SEQ ID NO:107; and (b) a nucleic acid that hybridizes to the complement of the nucleic acid of (a) under low stringency conditions. In alternate embodiments, hybridization may occur under moderate or high stringency conditions.

[0020] In one embodiment, the nucleic acid probe is a fragment of the nucleic acid probes disclosed herein that is complementary to the binding area of interest.

[0021] In an additional embodiment, the probes may be used to detect a change in chromosomal structure. These changes in chromosomal structure may be associated with a variety of diseases. For example, lymphomas are frequently associated with translocations. As another example, the human ETV6 gene (Golub et al., Cell, 77:307-16 (1994)), also known as TEL, consists of 8 exons occupying a region of 240 kb on chromosome 12 band p13 (Baens et al., Genome Res., 6:404-13 (1996)). The ETV6 protein contains two critical domains, the 5 helix-loop-helix (HLH) dimerization domain coded by exon 3 and 4, whereas exons 6-8 code a 3′ E26 transformations-specific (ETS) DNA-binding domain (Id.). The ETV6 gene encodes a sequence-specific transcriptional repressor that is required specifically for hematopoiesis within the bone marrow (Wang et al., Genes Dev., 12:2392-402 (1998)). This gene has been identified in fusion with many different partners and in a wide spectrum of human leukemias such as in chronic myelomonocytic leukemia (CMML), acute myeloid leukemia (AML), and acute lymphoblastic leukemia (ALL) (Mitelman et al., available at http://cgap.nci.nih.gov/Chromosomes/Mitelman).

[0022] The most common gene rearrangement in cancer of childhood is the fusion of ETV6 and AML1 (also know as RUNX1 and CBFA2) in approximately 22-25% of the cases with childhood B-lineage ALL (Shurtleff et al., Leukemia, 9:1985-89 (1995); Romana et al., Blood, 86:4263-69 (1995)). The ETV6/AML 1 translocation involves the ETV6 disrupting the gene between the HLH motif and the ETS DNA-binding domain. This fusion results in a cryptic t(12;21) translocation that is easily missed by conventional cytogenetic analysis because the rearranged fragments barely affect the morphology of the involved chromosomes (Ferrando and Look, Sem. Hematol., 37:381-95 (2000)). Deletion of the nontranslocated ETV6 allele are frequently associated with a t(12,21) in childhood ALL (Raynaud et al., Blood, 87:2891-99 (1996); Cave et al., Leukemia, 11:1459-64 (1997)). The extent of this deletion is highly variable ranging from, in the majority of cases, where the whole of ETV6 is deleted to a small number where the deletion is intragenic (Raynaud et al., Blood, 87:2891-99 (1996)). The presence of t(12;21) is shown to be a significant favorable prognostic factor, with event-free survivals of 91% in childhood ALL (Rubnitz et al., J. Clin. Oncol., 15:1150-57 (1997)). Table 1 provides a non-exhaustive list of some of the diseases detected by the probes of the invention.

TABLE 1

| | ETV6 | TCF3 | TLX3 | MLL | BCR | BCL2 | BCL3 |
|---|---|---|---|---|---|---|---|
| chronic myelomonocytic leukemia (CMML) | + | − | + | + | − | − | − |
| myelodysplastic syndrome (MDS) | + | − | − | + | − | − | − |
| acute lymphoblastic leukemia (ALL) | + | + | + | + | + | − | − |
| acute myelocytic leukemia (AML) | + | − | − | + | + | − | − |
| chronic myelogenous leukemia (CML) | + | − | − | + | + | − | − |
| T-cell prolymphocytic leukemia | − | − | − | − | − | − | − |
| T-cell large granular lymphocyte leukemia (T-LGL) | − | − | − | + | − | − | − |
| Hypereosinophilic syndrome (HES) | − | − | − | − | − | − | − |
| Anaplastic large cell lymphoma (ALCL) | − | − | − | − | − | − | + |
| Lymphoplasmocytic lymphoma (LPL) | − | − | − | − | − | − | − |
| Burkitt's lymphoma (BL) | − | − | − | − | − | − | − |
| Mantle cell lymphoma (SMZL) | − | − | − | − | − | − | − |
| Splenic marginal zone lymphoma (SMZL) | − | − | − | − | − | − | − |
| Marginal zone (MALT) | − | − | − | − | − | − | − |
| Follicular lymphoma (FL) | − | − | − | − | − | + | − |
| Diffuse large cell lymphoma (DLBCL) | − | − | − | − | − | + | − |
| T-cell leukemia/lymphoma (TLL) | − | − | − | − | − | − | − |
| Multiple myeloma (MM) | − | − | − | − | − | + | − |
| lymphoma | − | − | − | − | − | + | + |

[0023]

| | BCL6 | BCL10 | MALT1 | MYC | PAX5 | CCND1 |
|---|---|---|---|---|---|---|
| chronic myelomonocytic leukemia (CMML) | − | − | − | + | − | − |
| myelodysplastic syndrome (MDS) | − | − | − | + | − | − |
| acute lymphoblastic leukemia (ALL) | − | − | − | + | − | − |
| acute myelocytic leukemia (AML) | − | − | − | + | − | − |
| chronic myelogenous leukemia (CML) | − | − | − | − | − | − |
| T-cell prolymphocytic leukemia | − | − | − | − | − | − |
| T-cell large granular lymphocyte leukemia (T-LGL) | − | − | − | − | − | − |
| Hypereosinophilic syndrome (HES) | − | − | − | − | − | − |
| Anaplastic large cell lymphoma (ALCL) | − | − | − | − | − | − |
| Lymphoplasmocytic lymphoma (LPL) | − | − | − | − | + | − |
| Burkitt's lymphoma (BL) | − | − | − | + | − | − |
| Mantle cell lymphoma (SMZL) | − | − | − | − | − | + |
| Splenic marginal zone lymphoma (SMZL) | − | − | − | − | − | + |
| Marginal zone (MALT) | − | + | + | − | − | − |
| Follicular lymphoma (FL) | + | − | − | − | − | − |
| Diffuse large cell lymphoma (DLBCL) | + | + | − | + | − | − |
| T-cell leukemia/lymphoma (TLL) | − | − | − | − | − | − |
| Multiple myeloma (MM) | − | − | − | + | − | + |
| lymphoma | + | + | + | + | + | + |

[0024]

| | TLX1 | TCRAD | TCRB | TCRG | PDGFRA | PDGFRB |
|---|---|---|---|---|---|---|
| chronic myelomonocytic leukemia (CMML) | − | − | − | − | − | − |
| myelodysplastic syndrome (MDS) | − | − | − | − | − | − |
| acute lymphoblastic leukemia (ALL) | + | − | − | − | − | − |
| acute myelocytic leukemia (AML) | − | − | − | − | − | − |
| chronic myelogenous leukemia (CML) | − | − | − | − | − | + |
| T-cell prolymphocytic leukemia | − | + | + | + | − | − |
| T-cell large granular lymphocyte leukemia (T-LGL) | − | + | + | + | − | − |
| Hypereosinophilic syndrome (HES) | − | − | − | − | + | − |
| Anaplastic large cell lymphoma (ALCL) | − | − | − | − | − | − |
| Lymphoplasmocytic lymphoma (LPL) | − | − | − | − | − | − |
| Burkitt's lymphoma (BL) | − | − | − | − | − | − |
| Mantle cell lymphoma (SMZL) | − | − | − | − | − | − |
| Splenic marginal zone lymphoma (SMZL) | − | − | − | − | − | − |
| Marginal zone (MALT) | − | − | − | − | − | − |
| Follicular lymphoma (FL) | − | − | − | − | − | − |
| Diffuse large cell lymphoma (DLBCL) | − | − | − | − | − | − |
| T-cell leukemia/lymphoma (TLL) | − | + | + | + | − | − |
| Multiple myeloma (MM) | − | − | − | − | − | − |
| lymphoma | − | + | + | + | − | − |

[0025] Other embodiments include kits or compositions containing the probes of the invention wherein the kit or composition may be used to diagnose the aforementioned diseases or any other disease also associated with the target sequences bound by the claimed probes.

[0026] Additional objects and advantages of the invention will be set forth in part in the description which follows. In addition, the foregoing general description and the following detailed description are exemplary and explanatory only and are not restrictive of the invention, as claimed.

### BRIEF DESCRIPTION OF THE DRAWINGS

[0027] FIG. 1 shows using an unlabeled blocking probe to block the binding of labeled probes to a chromosome breakpoint. In the top portion of the figure, two “red probes” are depicted at the top left using thin lines, four “green probes” are depicted at the top right using thick lines. The “blocking probe” is depicted using medium-weight lines. On the three plates shown, lighter shaded areas represent the signal from the first label (for example, red), darker shaded areas represent the signal from the second label (for example, green), and unshaded areas represent co-localized (for example, green/red) signals.

[0028] FIG. 2 shows hybridization of BCR probes to metaphase chromosomes. (A) Drawing of the area covered by the probes, with different colored probes denoted by short and long dashed lines; (B) Hybridization of the BCR probes to metaphase spreads from normal peripheral blood. Two normal BCR loci on chromosomes 22 are represented by two light colored dots (e.g. yellow, from the superimposition of green and red signals) or co-localized different colored signals (e.g. green and red); (C) Hybridization of the BCR probes to nuclei from normal peripheral blood. Two normal BCR loci are represented by two light colored dots or co-localized different colored signals; (D) Hybridization of the BCR probes to metaphase spreads from the cell line BV173. One normal BCR locus on chromosome 22 is represented by a light colored dot or co-locolized signals from two differently colored probes (see the bright dots at the top left of the figure). Two derivative chromosomes resulting from a translocation between chromosome 9 and 22 (in cell line BV173) can be detected. An additional chromosome 9 can be detected as a result of an amplification of the derivative chromosome 9; (E) Hybridization of the BCR probes to nuclei from the cell line BV173. One normal BCR locus is represented by a light colored dot or co-locolized signals from two different colored probes. (See the brightly colored dots at the top right side of the nuclei pictured here.) Two derivative chromosomes resulting from a translocation between chromosome 9 and 22 (in cell line BV173) can be detected. An additional chromosome 9 can be detected as a result of an amplification of the derivative chromosome 9.

[0029] FIG. 3 shows hybridization of ETV6 probes to metaphase chromosomes. (A) Drawing of the area cover by the probes, with different colored probes denoted by short and long dashed lines; (B) Hybridization of the ETV6 probes to metaphase spreads from normal peripheral blood. Two normal ETV6 loci on chromosomes 12 are represented by two light colored dots or co-locolized different color signals; (C) Hybridization of the ETV6 probes to nuclei from normal peripheral blood. Two normal ETV6 loci are represented by two light colored dots or co-locolized different colored signals; (D) Hybridization of the ETV6 probes to metaphase spreads from the cell line REH. The normal ETV6 locus on chromosome 12 is deleted, represented by the lack of a light colored dot or co-locolized different colored signals. Instead, each signal shown on this spread is one pure color (green or red). Two derivative chromosomes resulting from a translocation between chromosome 12 and 21 (in cell line REH) can be detected. A small green signal can be detected as a remaining part of the deleted ETV6 locus; (E) Hybridization of the ETV6 probes to nuclei from the cell line REH. The normal ETV6 locus on chromosome 12 is deleted, represented by the lack of a light colored dot or co-locolized different color signals. Two derivative chromosomes resulting from a translocation between chromosome 12 and 21 (in cell line REH) can be detected. A small green signal can be detected as a remaining part of the deleted ETV6 locus (top right and bottom left dots on this spread).

[0030] FIG. 4 shows hybridization of MLL probes to metaphase chromosomes. (A) Drawing of the area cover by the probes, with different colored probes denoted by short and long dashed lines; (B) Hybridization of the MLL probes to metaphase spreads from normal peripheral blood. Two normal MLL loci on chromosomes 11 are represented by two light colored dots or co-locolized different colored signals (all four dots shown); (C) Hybridization of the MLL probes to nuclei from normal peripheral blood. Two normal MLL loci are represented by two light colored dots or co-locolized different colored signals (all dots shown); (D) Hybridization of the MLL probes to metaphase spreads from the cell line RS-4;11. One normal MLL locus on chromosome 11 is represented by a light colored dot or co-locolized different colored signals (at top right). Two derivative chromosomes resulting from a translocation between chromosome 4 and 11 (in cell line RS-4;11) can be detected; (E) Hybridization of the MLL probes to nuclei from the cell line RS-4;11. One normal MLL locus on chromosome 11 is represented by a light colored dot or co-locolized different colored signals (larger dots on the spread at top right and at bottom). Two derivative chromosomes resulting from a translocation between chromosome 4 and 11 (in cell line RS-4; 11) can be detected.

[0031] FIG. 5 shows hybridization of TCF3 probes to metaphase chromosomes. (A) Drawing of the area cover by the probes, with different colored probes denoted by short and long dashed lines; (B) Hybridization of the TCF3 probes to metaphase spreads from normal peripheral blood. Two normal TCF3 loci on chromosomes 19 are represented by two light colored dots or co-locolized different colored signals; (C) Hybridization of the TCF3 probes to nuclei from normal peripheral blood. Two normal TCF3 loci are represented by two light colored dots or co-locolized different colored signals; (D) Hybridization of the TCF3 probes to metaphase spreads from the cell line 697. One normal TCF3 locus on chromosome 19 is represented by a light colored dot or co-locolized different colored signals (two bright dots at right). Two derivative chromosomes resulting from a translocation between chromosome 1 and 19 (in cell line 697) can be detected; (E) Hybridization of the TCF3 probes to nuclei from the cell line 697. One normal TCF3 locus on chromosome 19 is represented by a light colored dot or co-locolized different colored signals (central juxtaposed dots on the spread). Two derivative chromosomes resulting from a translocation between chromosome 1 and 19 (in cell line 697) can be detected.

[0032] FIG. 6 shows hybridization of TLX3 probes to metaphase chromosomes. (A) Drawing of the area cover by the probes, with different colored probes denoted by short and long dashed lines; (B) Hybridization of the TLX3 probes to metaphase spreads from normal peripheral blood. Two normal TLX3 loci on chromosomes 5 are represented by two light colored dots or co-locolized different colored signals (all dots shown here); (C) Hybridization of the TLX3 probes to nuclei from normal peripheral blood. Two normal TLX3 loci are represented by two light colored dots or co-locolized different colored signals; (D) Hybridization of the TLX3 probes to metaphase spreads from the cell line HPB-ALL. One normal TLX3 locus on chromosome 5 is represented by a light colored dot or co-locolized different colored signals (at top right). Two derivative chromosomes resulting from a translocation between chromosome 5 and 14 (in cell line HPB-ALL) can be detected; (E) Hybridization of the TLX3 probes to nuclei from the cell line HPB-ALL. One normal TLX3 locus on chromosome 5 is represented by a light colored dot or co-locolized different colored signals (dot at center). Two derivative chromosomes resulting from a translocation between chromosome 5 and 14 (in cell line HPB-ALL) can be detected.

[0033] Color versions of FIGS. 1-6 were submitted with U.S. Provisional Application No. 60/567,570, which is incorporated herein by reference and to which this application claims priority.

### DESCRIPTION OF THE INVENTION

[0034] As used herein, the term “probe” refers to a “nucleic acid” probe or to a “nucleic acid analog” probe. As used herein, the term “nucleic acid” refers to a nucleobase sequence-containing oligomer, polymer, or polymer segment, having a backbone formed solely from naturally occurring nucleotides or unmodified nucleotides. As used herein, a “nucleic acid analog” means an oligomer, polymer, or polymer segment composed of at least one modified nucleotide, or subunits derived directly from a modification of nucleotides. Non-limiting examples of naturally occurring nucleobases include: adenine, cytosine, guanine, thymine, and uracil. Non-limiting examples of modified nucleotides include: 5-propynyl-uracil, 2-thio-5-propynyl-uracil, 5-methylcytosine, pseudoisocytosine, 2-thiouracil and 2-thiothymine, 2-aminopurine, N9-(2-amino-6-chloropurine), N9-(2,6-diaminopurine), hypoxanthine, N9-(7-deaza-guanine), N9-(7-deaza-8-aza-guanine) and N8-(7-deaza-8-aza-adenine). Other non-limiting examples of suitable nucleobases include those nucleobases illustrated in FIGS. 2(A) and 2(B) of Buchardt et al. (U.S. Pat. No. 6,357,163).

[0035] The term “nucleic acid analog” also refers to synthetic molecules that can bind to a nucleic acid. For example, a nucleic acid analog probe may be comprised of peptide nucleic acids (PNAs), locked nucleic acids (LNAs), or any derivatized form of a nucleic acid. As used herein, the term “peptide nucleic acid” or “PNA” means any oligomer or polymer comprising at least one or more PNA subunits (residues), including, but not limited to, any of the oligomer or polymer segments referred to or claimed as peptide nucleic acids in U.S. Pat. Nos. 5,539,082, 5,527,675, 5,623,049, 5,714,331, 5,718,262, 5,736,336, 5,773,571, 5,766,855, 5,786,461, 5,837,459, 5,891,625, 5,972,610, 5,986,053, 6,107,470 6,201,103, 6,228,982 and 6,357,163; all of which are herein incorporated by reference. The term PNA also applies to any oligomer or polymer segment comprising two or more subunits of those nucleic acid mimics described in the following publications: Lagriffoul et al., Bioorganic & Medicinal Chemistry Letters, 4:1081-1082 (1994); Petersen et al., Bioorganic & Medicinal Chemistry Letters, 6: 793-796 (1996); Diderichsen et al., Tett. Lett. 37: 475-478 (1996); Fujii et al., Bioorg. Med. Chem. Lett. 7: 637-627 (1997); Jordan et al., Bioorg. Med. Chem. Lett. 7: 687-690 (1997); Krotz et al., Tett. Lett. 36: 6941-6944 (1995); Lagriffoul et al., Bioorg. Med. Chem. Lett. 4: 1081-1082 (1994); Diederichsen, U., Bioorganic & Medicinal Chemistry Letters, 7:1743-1746 (1997); Lowe et al., J. Chem. Soc. Perkin Trans. 1, (1997) 1: 539-546; Lowe et al., J. Chem. Soc. Perkin Trans. 11: 547-554 (1997); Lowe et al., J. Chem. Soc. Perkin Trans. 11:555-560 (1997); Howarth et al., J. Org. Chem. 62:5441-5450 (1997); Altmann, K-H et al., Bioorganic & Medicinal Chemistry Letters, 7:1119-1122 (1997); Diederichsen, U., Bioorganic & Med. Chem. Lett., 8:165-168 (1998); Diederichsen et al., Angew. Chem. Int. Ed., 37: 302-305 (1998); Cantin et al., Tett. Lett., 38:4211-4214 (1997); Ciapetti et al., Tetrahedron, 53: 1167-1176 (1997); Lagriffoule et al., Chem. Eur. J., 3:912-919 (1997); Kumar et al., Organic Letters 3(9): 1.269-1272 (2001); and the Peptide-Based Nucleic Acid Mimics (PENAMs) of Shah et al. as disclosed in WO96/04000. As used herein, the term “locked nucleic acid” or “LNA” means an oligomer or polymer comprising at least one or more LNA subunits. As used herein, the term “LNA subunit” means a ribonucleotide containing a methylene bridge that connects the 2′-oxygen of the ribose with the 4′-carbon. See generally, Kurreck, Eur. J. Biochem., 270:1628-44 (2003).

[0036] The term “identical” means that a relevant sequence is 100% identical to the non-repetitive region of a given sequence. The term “substantially identical,” or “substantially” means that a relevant sequence is at least 70%, 75%, 80%, 85%, 90%, 92%, 95%, 96%, 97%, 98%, or 99% identical to the non-repetitive region of a given sequence. By way of example, such sequences may be allelic variants, sequences derived from various species, or they may be derived from the given sequence by truncation, deletion, amino acid substitution or addition. For nucleic acids, the length of comparison sequences will generally be at least 50, 100, 150, 300, or more nucleotides. Percent identity between two sequences is determined by standard alignment algorithms such as, for example, Basic Local Alignment Tool (BLAST) described in Altschul et al., J. Mol. Biol., 215:403-410 (1990), the algorithm of Needleman et al., J. Mol. Biol., 48:444-453 (1970), or the algorithm of Meyers et al., Comput. Appl. Biosci., 4:11-17 (1988).

[0037] In one embodiment, the nucleic acid probe is selected from (a) a nucleic acid comprising at least one nucleotide sequence substantially as set out in Table 2; and (b) a nucleic acid that hybridizes to the complement of the nucleic acid of (a) under low stringency conditions.

TABLE 2

| Probe Name | SEQ ID NO |
|---|---|
| CTD-2369H12 | 1 |
| RP11-126O16 | 2 |
| RP11-138L23 | 3 |
| RP11-317H11 | 4 |
| RP11-50C6 | 5 |
| RP11-787B21 | 6 |
| CTC-347D24 | 7 |
| CTD-3245B9 | 8 |
| RP11-770K18 | 9 |
| RP11-861M13 | 10 |
| CTD-2315O11 | 11 |
| CTD-2349A14 | 12 |
| RP11-1085P18 | 13 |
| RP11-41L5 | 14 |
| CTC-774G15 | 15 |
| CTD-2533O12 | 16 |
| RP11-359A14 | 17 |
| RP11-757G14 | 18 |
| CTD-2276B6 | 19 |
| RP11-31L9 | 20 |
| CTD-2507C12 | 21 |
| CTD-2302P22 | 22 |
| CTD-2609M2 | 23 |
| CTC-345A15 | 24 |
| RP11-21J15 | 25 |
| CTD-3050B7 | 26 |
| RP11-1147O10 | 27 |
| CTD-3235E20 | 28 |
| RP11-1152E1 | 29 |
| RP11-114C2 | 30 |
| CTD-2270P21 | 31 |
| RP11-656G2 | 32 |
| RP11-111L20 | 33 |
| RP11-110J22 | 34 |
| CTD-2375L4 | 35 |
| CTD-2568B10 | 36 |
| RP11-465M10 | 37 |
| RP11-120O8 | 38 |
| CTD-2582N5 | 39 |
| RP11-980C24 | 40 |
| RP11-440O4 | 41 |
| CTD-3232P6 | 42 |
| RP11-69M23 | 43 |
| RP11-174N16 | 44 |
| RP11-350K6 | 45 |
| CTD-2160F24 | 46 |
| CTD-2151C21 | 47 |
| CTD-2267H22 | 48 |
| RP11-1136L8 | 49 |
| CTD-2533C10 | 50 |
| RP11-382A18 | 51 |
| RP11-601F15 | 52 |
| RP11-220I1 | 53 |
| RP11-74F19 | 54 |
| RP11-344B23 | 55 |
| RP11-8N6 | 56 |
| RP11-117L21 | 57 |
| RP11-902F7 | 58 |
| RP11-1143E20 | 59 |
| RP11-156B3 | 60 |
| RP11-195M19 | 61 |
| RP11-626H12 | 62 |
| RP11-805J14 | 63 |
| RP11-21E23 | 64 |
| RP11-729E13 | 65 |
| CTD-2339D24 | 66 |
| RP11-324L3 | 67 |
| RP11-885N18 | 68 |
| RP11-654G17 | 69 |
| RP11-290M5 | 70 |
| RP11-81E15 | 71 |
| RP11-412P14 | 72 |
| RP11-114K5 | 73 |
| RP11-739N13 | 74 |
| RP11-484D4 | 75 |
| CTD-3166K20 | 76 |
| CTD-2373N7 | 77 |
| RP11-654A2 | 78 |
| RP11-246A2 | 79 |
| CTD-2355L21 | 80 |
| RP11-158G6 | 81 |
| RP11-780M2 | 82 |
| RP11-481C14 | 83 |
| CTD-2265E20 | 84 |
| RP11-790D5 | 85 |
| RP11-721D13 | 86 |
| CTD-3131N3 | 87 |
| RP11-260G10 | 88 |
| RP11-115G1 | 89 |
| CTD-3053D22 | 90 |
| RP11-426J23 | 91 |
| RP11-114B6 | 92 |
| CTD-2505P4 | 93 |
| CTD-2191C10 | 94 |
| RP11-1084E14 | 95 |
| CTD-2371J15 | 96 |
| RP11-571I18 | 97 |
| RP11-39D6 | 98 |
| CTD-3033C24 | 99 |
| RP11-545H22 | 100 |
| RP11-84L10 | 101 |
| CTD-3180G20 | 102 |
| RP11-1120I24 | 103 |
| RP11-759G10 | 104 |
| RP11-3G18 | 105 |
| RP11-136E22 | 106 |
| RP11-1079A8 | 107 |

[0038] In an alternate embodiment, the nucleic acid probes of the invention are identical to at least one of the sequences identified in Table 2.

[0039] A probe binds to a target sequence under certain conditions. The term “bind” is synonymous with “hybridize.” When two molecules hybridize, they form a combination of the two molecules through one or more types of chemical bonds, through complementary base pairing, or through hydrogen bond formation. In addition, bases in a probe may be joined by a linkage other than a phosphodiester bond, so long as it does not prevent hybridization. Thus, oligonucleotide probes may have constituent bases joined by peptide bonds rather than phosphodiester linkages. As used herein, the term complementary refers to nucleobases that may hybridize to each other. For example, adenine is complementary to thymine and cytosine is complementary to guanine. As used herein, the term “binds under certain conditions” is intended to describe conditions for hybridization and washes under which nucleotide sequences that are significantly identical or homologous to each other remain bound to each other. The conditions may be such that sequences, which are at least about 70%, such as at least about 80%, and such as at least about 85-90% identical, remain bound to each other. As used herein, the term “target sequence” refers to the nucleobase sequence sought to be determined. The nucleobase sequence can be a subsequence of a nucleic acid molecule of interest (e.g. a chromosome). In other embodiments, the target sequences are located in the ETV6 gene, the MLL gene, the TCF3 gene (also known as the E2A gene), or the TLX3 gene (also known as the HOX11L2 gene).

[0040] Appropriate hybridization conditions can be selected by those skilled in the art with minimal experimentation as exemplified in Ausubel et al. (1995), Current Protocols in Molecular Biology, John Wiley & Sons, sections 2, 4, and 6. Additionally, stringency conditions are described in Sambrook et al. (1989) Molecular Cloning: A Laboratory Manual, 2nd ed., Cold Spring Harbor Press, chapters 7, 9, and 11. As used herein, defined conditions of “low stringency” are as follows. Filters containing DNA are pretreated for 6 h at 40° C. in a solution containing 35% formamide, 5×SSC, 50 mM Tris-HCl (pH 7.5), 5 mM EDTA, 0.1% PVP, 0.1% Ficoll, 1% BSA, and 500 μg/ml denatured salmon sperm DNA. Hybridizations are carried out in the same solution with the following modifications: 0.02% PVP, 0.02% Ficoll, 0.2% BSA, 100 μg/ml salmon sperm DNA, 10% (wt/vol) dextran sulfate, and 5-20×10⁶ cpm of ³²P-labeled probe is used. Filters are incubated in hybridization mixture for 18-20 h at 40° C., and then washed for 1.5 h at 55° C. In a solution containing 2×SSC, 25 mM Tris-HCl (pH 7.4), 5 mM EDTA, and 0.1% SDS. The wash solution is replaced with fresh solution and incubated an additional 1.5 h at 60° C. Filters are blotted dry and exposed for autoradiography.

[0041] As used herein, defined conditions of “moderate stringency” are as follows. Filters containing DNA are pretreated for 7 h at 50° C. in a solution containing 35% formamide, 5×SSC, 50 mM Tris-HCl (pH 7.5), 5 mM EDTA, 0.1% PVP, 0.1% Ficoll, 1% BSA, and 500 μg/ml denatured salmon sperm DNA. Hybridizations are carried out in the same solution with the following modifications: 0.02% PVP, 0.02% Ficoll, 0.2% BSA, 100 μg/ml salmon sperm DNA, 10% (wt/vol) dextran sulfate, and 5-20×10⁶ cpm of ³²P-labeled probe is used. Filters are incubated in hybridization mixture for 30 h at 50° C., and then washed for 1.5 h at 55° C. In a solution containing 2×SSC, 25 mM Tris-HCl (pH 7.4), 5 mM EDTA, and 0.1% SDS. The wash solution is replaced with fresh solution and incubated an additional 1.5 h at 60° C. Filters are blotted dry and exposed for autoradiography.

[0042] As used herein, defined conditions of “high stringency” are as follows. Prehybridization of filters containing DNA is carried out for 8 h to overnight at 65° C. in buffer composed of 6×SSC, 50 mM Tris-HCl (pH 7.5), 1 mM EDTA, 0.02% PVP, 0.02% Ficoll, 0.02% BSA, and 500 μg/ml denatured salmon sperm DNA. Filters are hybridized for 48 h at 65° C. in the prehybridization mixture containing 100 μg/ml denatured salmon sperm DNA and 5-20×10⁶ cpm of ³²P-labeled probe. Washing of filters is done at 37° C. for 1 h in a solution containing 2×SSC, 0.01% PVP, 0.01% Ficoll, and 0.01% BSA. This is followed by a wash in 0.1×SSC at 50° C. for 45 minutes.

[0043] Other conditions of low, moderate, and high stringency well known in the art (e.g., as employed for cross-species hybridizations) may be used if the above conditions are inappropriate (e.g., as employed for cross-species hybridizations).

[0044] In one embodiment, the probes comprise a detectable label. As used herein, a detectable label refers to moieties that can be attached directly or indirectly to an oligomer or polymer to thereby render the oligomer or polymer detectable by an instrument or method. In one embodiment, a detectable label may be directly attached to a probe. In another embodiment, a detectable label may be indirectly attached to a probe. For example, a detectable label may be attached to a probe by using a linker. A detectable label may be, for example, a fluorochrome, a chromophore, a spin label, a radioisotope, an enzyme, a hapten, Quantum Dot, beads, aminohexyl, pyrene, and a chemiluminescence compound, such as acridinione. Fluorochromes that may be used in the method of the present invention include, but are not limited to, IR dyes, Dyomics dyes, phycoerythrine, cascade blue, Oregon green 488, pacific blue, rhodamine green, 5(6)-carboxyfluorescein, cyanine dyes (i.e., Cy2, Cy3, Cy 3.5, Cy5, Cy5.5, Cy 7) (diethyl-amino)coumarin, fluorescein (i.e., FITC), tetramethylrhodamine, lissamine, Texas Red, AMCA, TRITC, and Alexa dyes. Haptens that may be used in the present invention include, but are not limited to, 5(6)-carboxyfluorescein, 2,4-dinitrophenyl, digoxigenin, rhodamine, bromodeoxy uridine, acetylaminoflurene, mercury trinitrophenol, estradiol, and biotin. Enzymes that may be used in the present invention include, but are not limited to, soybean peroxidase, alkaline phosphatase, and horseradish peroxidase.

[0045] The probes of the invention may constitute part of a kit. In one embodiment, the kit is comprised of (a) at least two of the probes of the invention and (b) other reagents and compositions for performing an assay to detect a change in chromosomal structure. The invention also encompasses methods for using the probes of the invention. For example, in methods for detecting a change in chromosomal structure. In another embodiment, the method comprises (a) obtaining a preparation of chromosomes; (b)contacting the preparation of chromosomes with at least two of the probes of the invention, wherein the probes each contain a different label distinguishable from the other label and wherein the labeled probes create a pattern of staining in a sample of normal control chromosomes; and (c) detecting the change in chromosomal structure by detecting a change in the pattern of staining in the chromosome preparation as compared to the normal control sample.

[0046] As used herein, the term “change in chromosomal structure” refers to an alteration in the chromosomes in a test sample as compared to a normal chromosome control. As used herein, a euploidy is the condition of having a normal number of structurally normal chromosomes. For example, somatic euploid cells from a human female contain 44 autosomal chromosomes and two X-chromosomes for a total of 46 chromosomes or 23 chromosomal pairs. Euploid bulls have 58 autosomal chromosomes, one X-chromosome, and one Y-chromosome.

[0047] Non-exhaustive examples of chromosomal alterations include aneuploidy, gene amplifications, deletions including gene deletions, gene fusions, translocations, duplications, insertions, or inversions. As used herein, aneuploidy refers to any deviation from the normal euploid state or the condition of having less than or more than the normal diploid number of chromosomes. Aneuploidy is the most frequently observed type of cytogenetic abnormality. Generally, aneuploidy is recognized as a small deviation from euploidy because major deviations are rarely detected because of the lethal nature of major changes in chromosome number. As used herein, an amplification refers to an increase in the number of copies of a specific DNA fragment. Such DNA fragments include, for example, a gene or an entire chromosome. As used herein, a deletion refers to a genetic event in which a nucleic acid sequence has been removed from a chromosome. As used herein, a gene fusion refers to an accidental joining of the DNA of two genes. Gene fusions may occur by translocations or inversions. Gene fusions may give rise to hybrid proteins or the misregulation of the transcription of one gene due to the juxtaposition of cis regulatory elements (e.g., enhancers or promoters) of another gene. As used herein, a translocation refers to a genetic event in which a part of the nucleic acid sequence of one chromosome is removed from that chromosome and attached to a different chromosome. As used herein, a duplication refers to the repetition of a nucleotide sequence in a chromosome or a chromosome segment. For example, a duplication may result in the repetition of a nucleotide sequence in linear juxtaposition to the duplicated sequence. As used herein, an insertion refers to a genetic event in which a nucleic acid sequence has been introduced between two points in a chromosome. As used herein, an inversion is a genetic event in which a nucleic acid sequence's orientation in a chromosome has been reversed. As used herein, a chromosomal breakpoint refers to a location in the chromosome where the chromosome breaks into two pieces.

[0048] As used herein, a preparation of chromosomes refers to a composition comprised of chromosomes from a cell type of interest. A cell type of interest may be a mammalian cell. In a further embodiment, chromosome preparations may be produced from mammalian cells in various stages of mitosis. For example, chromosomal preparations may be produced from cells in metaphase. FISH may also be used on a preparation of chromosomes from cells in interphase. Methods for producing a chromosomal preparation and nuclei for use in FISH analysis are well known to those of skill in the art.

[0049] As used herein, the phrases “chosen from one or more of,” “chosen from at least one of,” “chosen from one or more,” and “chosen from at least one” followed by a list of items such as A, B, and C, indicate that one or more of A, B, and C may be selected (e.g. only A; only B; only C; only A and B; only B and C; only A and C; or A, B, and C), and also indicate that one or more types within each A, B, or C category may be selected (e.g. only A1 and A2; only A1 and A2 and B1; only B1 and B2 and C1, etc.).

[0050] Reference will now be made in detail to the following Examples, which are provided solely to further describe the invention. These Examples are in no way intended to limit the scope or meaning of the claims.

### EXAMPLES

### Example 1

[0051] Unique sequence probes were prepared as follows. Cells containing vectors comprising the probe of interest were grown in appropriate conditions for each cell line. DNA containing the probe sequence was isolated from the cell culture. See generally Zhao and Stodolsky, Methods in Molecular Biology: Library Construction, Physical Mapping, and Sequencing, Vol. 1, 1^{st} ed., Humana Press (2004).

[0052] The probe precursor DNA was directly labeled with a fluorochrome by nick translation. On ice, 10 μg of DNA was resuspended in 250 μl of reaction buffer. The reaction buffer contained 25 μl 10× nick translation buffer (500 mmol/L Tris-HCl, 100 mmol/L MgCl₂, 1 mmol/L DTT, 100 mg/L BSA, pH 7.5); 25 μl 10×dNTP mix (50 mmol/L Tris-HCl, 10 mmol/L EDTA, 0.5 mmol/L dATP, 0.5 mmol/L dGTP, 0.5 mmol/L dCTP, 0.34 mmol/L dTTP, pH 7.6); 4 μl of dUTP fluorochrome (1 mmol/L); 10 μl DNA polymerase I (Invitrogen, 10 μl); and 0.3 μl DNase I (Sigma Aldrich). The labeling reaction was incubated for 4 hours at 15° C. The reaction was stopped by adding 25 μl 500 mmol/L EDTA and incubating for 10 minutes at 65° C. Unincorporated nucleotides were removed by centrifugation using Microcon YM-10 Centrifugal Filter Devices (Milipore). The purified labeled probe was resuspended in 25 μl of ice cold (−20° C.)TE buffer (10 mmol/L Tris HCl, 0.1 mmol/L EDTA, pH 8.0).

### Example 2

[0053] A slide containing metaphase spreads and interphase nuclei was pretreated in TBS (50 mmol/L Tris, 150 mmol/L NaCl, pH 7.6) with 3.7% formaldehyde for 2 minutes at room temperature, as described in Human Cytogenetics, a Practical Approach, Volume 1, 2^{nd} ed., D. E. Rooney and B. H. Czepulkowski editors (1992). The slide was then rinsed twice in phosphate buffered saline (PBS) for 5 minutes per wash at room temperature. After rinsing, the slide was dehydrated in a cold (4° C.) series of ethanol by incubating the slide in 70% ethanol at 4° C. for 2 minutes; incubating the slide in 85% ethanol at 4° C. for 2 minutes; and then incubating the slide in 96% ethanol at 4° C. for 2 minutes, followed by air drying.

[0054] On each target area, 10 μL of DNA Hybridization Buffer (100 ng fluorescein labelled probe, 100 ng Texas Red labelled probe, 5 μM PNA Oligo Mix, 45% formamide, 300 mM NaCl, 5 mM NaPO4, 10% Dextran sulphate) was added and an 18×18 mm coverslip was applied to cover the hybridization area. The edges of the coverslip were sealed with rubber cement before denaturation at 82° C. for 5 minutes. The slide was hybridized overnight at 45° C. After hybridization, the coverslip was removed and the slide was washed for 10 minutes in a stringent wash buffer (0.2×SSC, 0.1% Triton X-100) at 65° C.

[0055] The slide was then rinsed in TBS for 1 minute before dehydrated in a cold (4° C.) series of 70%, 85% and 96% ethanol as described above. Each slide was mounted with 10 μL of anti-fade solution (Vectashield H-1000, Vector Laboratories, Inc. Burlingame) supplemented with 0.1 μg/mL 4,6-diamidino-2-phenylindole (DAPI, Sigma Chemicals) and sealed with a coverslip. The slide was analyzed using a fluorescence microscope equipped with a CCD digital camera.

[0056] FIGS. 2-6 provide results with probes that bind to the BCR, ETV6, MLL, TCF3, and TLX3 genes respectively.

### Example 3

[0057] BCL2 probes were hybridized to metaphase chromosomes from metaphase spreads from normal peripheral blood. Two normal BCL2 loci on chromosomes 18 were represented by two yellow dots or co-localized green/red signals.

[0058] BCL3 probes were hybridized to metaphase chromosomes from metaphase spreads from normal peripheral blood. Two normal BCL3 loci on chromosomes 19 were represented by two yellow dots or co-localized green/red signals.

[0059] BCL6 probes were hybridized to metaphase chromosomes from metaphase spreads from normal peripheral blood. Two normal BCL6 loci on chromosomes 3 were represented by two yellow dots or co-localized green/red signals.

[0060] CCND1 probes were hybridized to metaphase chromosomes from metaphase spreads from normal peripheral blood. Two normal CCND1 loci on chromosomes 11 were represented by two yellow dots or co-localized green/red signals.

[0061] MYC probes were hybridized to metaphase chromosomes from metaphase spreads from normal peripheral blood. Two normal MYC loci on chromosomes 8 were represented by two yellow dots or co-localized green/red signals.

[0062] MALT probes were hybridized to metaphase chromosomes from metaphase spreads from normal-peripheral blood. Two normal MALT loci on chromosomes 18 were represented by two yellow dots or co-localized green/red signals.

[0063] PAX5 probes were hybridized to metaphase chromosomes from metaphase spreads from normal peripheral blood. Two normal PAX5 loci on chromosomes 9 were represented by two yellow dots or co-localized green/red signals.

[0064] TLX1 probes were hybridized to metaphase chromosomes from metaphase spreads from normal peripheral blood. Two normal TLX1 loci on chromosomes 10 were represented by two yellow dots or co-localized green/red signals.

[0065] PDGFRA probes were hybridized to metaphase chromosomes of metaphase spreads and nuclei from the cell line ELO-1, and to nuclei from normal tissue. On the metaphase spreads, one normal PDGFRA locus on chromosome 4 was represented by a yellow dot or co-locolized green/red signals. Lack of one red signal indicated a sub-deletion. An additional chromosome 4 could be detected as a result of an amplification of the derivative chromosome 4. On the nuclei, one normal PDGFRA locus on chromosome 4 was represented by a yellow dot or co-locolized green/red signals. Lack of one red signal indicated an sub-deletion. An additional chromosome 4 could be detected as a result of an amplification of the derivative chromosome 4.

[0066] PDGFRB probes were also hybridized to metaphase chromosomes from metaphase spreads from the cell line NALM-6. One normal PDGFRA locus on chromosome 5 was represented by a yellow dot or co-locolized green/red signals. Lack of one green signal indicated an deletion of the derivative chromosome 5, while a red signal indicated a translocation to another chromsome.

[0067] Other embodiments of the invention will be apparent to those skilled in the art from consideration of the specification and practice of the invention disclosed herein. It is intended that the specification and examples be considered as exemplary only. All references either discussed or referred to herein are incorporated by reference.

1. An nucleic acid probe selected from:
(a) a nucleic acid comprising a nucleotide sequence substantially as set out in SEQ ID NO:1, SEQ ID NO:2, SEQ ID NO:3, SEQ ID NO:4, SEQ ID NO:5, SEQ ID NO:6, SEQ ID NO:7, SEQ ID NO:8, SEQ ID NO:9, SEQ ID NO:10, SEQ ID NO:11, SEQ ID NO:12, SEQ ID NO:13, SEQ ID NO:14, SEQ ID NO:15, SEQ ID NO:16, SEQ ID NO:17, SEQ ID NO:18, SEQ ID NO:19, SEQ ID NO:20, SEQ ID NO:21, SEQ. ID NO. 22, SEQ ID NO:23, SEQ ID NO:24, SEQ ID NO:25, SEQ ID NO:26, SEQ ID NO:27, SEQ ID NO:28, SEQ ID NO:29, SEQ ID NO:30, SEQ ID NO:31, SEQ ID NO:32, SEQ ID NO:33, SEQ ID NO:34, SEQ ID NO:35, SEQ ID NO:36, SEQ ID NO:37, SEQ ID NO:38, SEQ ID NO:39, SEQ ID NO:40, SEQ ID NO:41, SEQ ID NO:42, SEQ ID NO:43, SEQ ID NO:44, SEQ ID NO:45, SEQ ID NO:46, SEQ ID NO:47, SEQ ID NO:48, SEQ ID NO:49, SEQ ID NO:50, SEQ ID NO:51, SEQ ID NO:52, SEQ ID NO:53, SEQ ID NO:54, SEQ ID NO:55, SEQ ID NO:56, SEQ ID NO:57, SEQ ID NO:58, SEQ ID NO:59, SEQ ID NO:60, SEQ ID NO:61, SEQ ID NO:62, SEQ ID NO:63, SEQ ID NO:64, SEQ ID NO:65, SEQ ID NO:66, SEQ ID NO:67, SEQ ID NO:68, SEQ ID NO:69, SEQ ID NO:70, SEQ ID NO:71, SEQ ID NO:72, SEQ ID NO:73, SEQ ID NO:74, SEQ ID NO:75, SEQ ID NO:76, SEQ ID NO:77, SEQ ID NO:78, SEQ ID NO:79, SEQ ID NO:80, SEQ ID NO:81, SEQ ID NO:82, SEQ ID NO:83, SEQ ID NO:84, SEQ ID NO:85, SEQ ID NO:86, SEQ ID NO:87, SEQ ID NO:88, SEQ ID NO:89, SEQ ID NO:90, SEQ ID NO:91, SEQ ID NO:92, SEQ ID NO:93, SEQ ID NO:94, SEQ ID NO:95, SEQ ID NO:96, SEQ ID NO:97, SEQ ID NO:98, SEQ ID NO:99, SEQ ID NO:100, SEQ ID NO:101, SEQ ID NO:102, SEQ ID NO:103, SEQ ID NO:104, SEQ ID NO:105, SEQ ID NO:106, or SEQ ID NO:107; and (b) at least one nucleic acid or nucleic acid analog that hybridizes to the complement of the nucleic acid of (a) under low stringency conditions.

2. The nucleic acid probe of claim 1, wherein the nucleic acid of part (a) comprises a nucleotide sequence that is 70% identical to the sequence set out in SEQ ID NO:1, SEQ ID NO:2, SEQ ID NO:3, SEQ ID NO:4, SEQ ID NO:5, SEQ ID NO:6, SEQ ID NO:7, SEQ ID NO:8, SEQ ID NO:9, SEQ ID NO:10, SEQ ID NO:11, SEQ ID NO:12, SEQ ID NO:13, SEQ ID NO:14, SEQ ID NO:15, SEQ ID NO:16, SEQ ID NO:17, SEQ ID NO:18, SEQ ID NO:19, SEQ ID NO:20, SEQ ID NO:21, SEQ. ID NO. 22, SEQ ID NO:23, SEQ ID NO:24, SEQ ID NO:25, SEQ ID NO:26, SEQ ID NO:27, SEQ ID NO:28, SEQ ID NO:29, SEQ ID NO:30, SEQ ID NO:31, SEQ ID NO:32, SEQ ID NO:33, SEQ ID NO:34, SEQ ID NO:35, SEQ ID NO:36, SEQ ID NO:37, SEQ ID NO:38, SEQ ID NO:39, SEQ ID NO:40, SEQ ID NO:41, SEQ ID NO:42, SEQ ID NO:43, SEQ ID NO:44, SEQ ID NO:45, SEQ ID NO:46, SEQ ID NO:47, SEQ ID NO:48, SEQ ID NO:49, SEQ ID NO:50, SEQ ID NO:51, SEQ ID NO:52, SEQ ID NO:53, SEQ ID NO:54, SEQ ID NO:55, SEQ ID NO:56, SEQ ID NO:57, SEQ ID NO:58, SEQ ID NO:59, SEQ ID NO:60, SEQ ID NO:61, SEQ ID NO:62, SEQ ID NO:63, SEQ ID NO:64, SEQ ID NO:65, SEQ ID NO:66, SEQ ID NO:67, SEQ ID NO:68, SEQ ID NO:69, SEQ ID NO:70, SEQ ID NO:71, SEQ ID NO:72, SEQ ID NO:73, SEQ ID NO:74, SEQ ID NO:75, SEQ ID NO:76, SEQ ID NO:77, SEQ ID NO:78, SEQ ID NO:79, SEQ ID NO:80, SEQ ID NO:81, SEQ ID NO:82, SEQ ID NO:83, SEQ ID NO:84, SEQ ID NO:85, SEQ ID NO:86, SEQ ID NO:87, SEQ ID NO:88, SEQ ID NO:89, SEQ ID NO:90, SEQ ID NO:91, SEQ ID NO:92, SEQ ID NO:93, SEQ ID NO:94, SEQ ID NO:95, SEQ ID NO:96, SEQ ID NO:97, SEQ ID NO:98, SEQ ID NO:99, SEQ ID NO:100, SEQ ID NO:101, SEQ ID NO:102, SEQ ID NO:103, SEQ ID NO:104, SEQ ID NO:105, SEQ ID NO:106, or SEQ ID NO:107.

3. The nucleic acid probe of claim 1, wherein the nucleic acid of part (a) comprises a nucleotide sequence that is 80% identical to the sequence set out in SEQ ID NO:1, SEQ ID NO:2, SEQ ID NO:3, SEQ ID NO:4, SEQ ID NO:5, SEQ ID NO:6, SEQ ID NO:7, SEQ ID NO:8, SEQ ID NO:9, SEQ ID NO:10, SEQ ID NO:11, SEQ ID NO:12, SEQ ID NO:13, SEQ ID NO:14, SEQ ID NO:15, SEQ ID NO:16, SEQ ID NO:17, SEQ ID NO:18, SEQ ID NO:19, SEQ ID NO:20, SEQ ID NO:21, SEQ. ID NO. 22, SEQ ID NO:23, SEQ ID NO:24, SEQ ID NO:25, SEQ ID NO:26, SEQ ID NO:27, SEQ ID NO:28, SEQ ID NO:29, SEQ ID NO:30, SEQ ID NO:31, SEQ ID NO:32, SEQ ID NO:33, SEQ ID NO:34, SEQ ID NO:35, SEQ ID NO:36, SEQ ID NO:37, SEQ ID NO:38, SEQ ID NO:39, SEQ ID NO:40, SEQ ID NO:41, SEQ ID NO:42, SEQ ID NO:43, SEQ ID NO:44, SEQ ID NO:45, SEQ ID NO:46, SEQ ID NO:47, SEQ ID NO:48, SEQ ID NO:49, SEQ ID NO:50, SEQ ID NO:51, SEQ ID NO:52, SEQ ID NO:53, SEQ ID NO:54, SEQ ID NO:55, SEQ ID NO:56, SEQ ID NO:57, SEQ ID NO:58, SEQ ID NO:59, SEQ ID NO:60, SEQ ID NO:61, SEQ ID NO:62, SEQ ID NO:63, SEQ ID NO:64, SEQ ID NO:65, SEQ ID NO:66, SEQ ID NO:67, SEQ ID NO:68, SEQ ID NO:69, SEQ ID NO:70, SEQ ID NO:71, SEQ ID NO:72, SEQ ID NO:73, SEQ ID NO:74, SEQ ID NO:75, SEQ ID NO:76, SEQ ID NO:77, SEQ ID NO:78, SEQ ID NO:79, SEQ ID NO:80, SEQ ID NO:81, SEQ ID NO:82, SEQ ID NO:83, SEQ ID NO:84, SEQ ID NO:85, SEQ ID NO:86, SEQ ID NO:87, SEQ ID NO:88, SEQ ID NO:89, SEQ ID NO:90, SEQ ID NO:91, SEQ ID NO:92, SEQ ID NO:93, SEQ ID NO:94, SEQ ID NO:95, SEQ ID NO:96, SEQ ID NO:97, SEQ ID NO:98, SEQ ID NO:99, SEQ ID NO:100, SEQ ID NO:101, SEQ ID NO:102, SEQ ID NO:103, SEQ ID NO:104, SEQ ID NO:105, SEQ ID NO:106, or SEQ ID NO:107.

4. The nucleic acid probe of claim 1, wherein the nucleic acid of part (a) comprises a nucleotide sequence that is 90% identical to the sequence set out in SEQ ID NO:1, SEQ ID NO:2, SEQ ID NO:3, SEQ ID NO:4, SEQ ID NO:5, SEQ ID NO:6, SEQ ID NO:7, SEQ ID NO:8, SEQ ID NO:9, SEQ ID NO:10, SEQ ID NO:11, SEQ ID NO:12, SEQ ID NO:13, SEQ ID NO:14, SEQ ID NO:15, SEQ ID NO:16, SEQ ID NO:17, SEQ ID NO:18, SEQ ID NO:19, SEQ ID NO:20, SEQ ID NO:21, SEQ. ID NO. 22, SEQ ID NO:23, SEQ ID NO:24, SEQ ID NO:25, SEQ ID NO:26, SEQ ID NO:27, SEQ ID NO:28, SEQ ID NO:29, SEQ ID NO:30, SEQ ID NO:31, SEQ ID NO:32, SEQ ID NO:33, SEQ ID NO:34, SEQ ID NO:35, SEQ ID NO:36, SEQ ID NO:37, SEQ ID NO:38, SEQ ID NO:39, SEQ ID NO:40, SEQ ID NO:41, SEQ ID NO:42, SEQ ID NO:43, SEQ ID NO:44, SEQ ID NO:45, SEQ ID NO:46, SEQ ID NO:47, SEQ ID NO:48, SEQ ID NO:49, SEQ ID NO:50, SEQ ID NO:51, SEQ ID NO:52, SEQ ID NO:53, SEQ ID NO:54, SEQ ID NO:55, SEQ ID NO:56, SEQ ID NO:57, SEQ ID NO:58, SEQ ID NO:59, SEQ ID NO:60, SEQ ID NO:61, SEQ ID NO:62, SEQ ID NO:63, SEQ ID NO:64, SEQ ID NO:65, SEQ ID NO:66, SEQ ID NO:67, SEQ ID NO:68, SEQ ID NO:69, SEQ ID NO:70, SEQ ID NO:71, SEQ ID NO:72, SEQ ID NO:73, SEQ ID NO:74, SEQ ID NO:75, SEQ ID NO:76, SEQ ID NO:77, SEQ ID NO:78, SEQ ID NO:79, SEQ ID NO:80, SEQ ID NO:81, SEQ ID NO:82, SEQ ID NO:83, SEQ ID NO:84, SEQ ID NO:85, SEQ ID NO:86, SEQ ID NO:87, SEQ ID NO:88, SEQ ID NO:89, SEQ ID NO:90, SEQ ID NO:91, SEQ ID NO:92, SEQ ID NO:93, SEQ ID NO:94, SEQ ID NO:95, SEQ ID NO:96, SEQ ID NO:97, SEQ ID NO:98, SEQ ID NO:99, SEQ ID NO:100, SEQ ID NO:101, SEQ ID NO:102, SEQ ID NO:103, SEQ ID NO:104, SEQ ID NO:105, SEQ ID NO:106, or SEQ ID NO:107.

5. The nucleic acid probe of claim 1, wherein the nucleic acid of part (a) comprises a nucleotide sequence that is 95% identical to the sequence set out in SEQ ID NO:1, SEQ ID NO:2, SEQ ID NO:3, SEQ ID NO:4, SEQ ID NO:5, SEQ ID NO:6, SEQ ID NO:7, SEQ ID NO:8, SEQ ID NO:9, SEQ ID NO:10, SEQ ID NO:11, SEQ ID NO:12, SEQ ID NO:13, SEQ ID NO:14, SEQ ID NO:15, SEQ ID NO:16, SEQ ID NO:17, SEQ ID NO:18, SEQ ID NO:19, SEQ ID NO:20, SEQ ID NO:21, SEQ. ID NO. 22, SEQ ID NO:23, SEQ ID NO:24, SEQ ID NO:25, SEQ ID NO:26, SEQ ID NO:27, SEQ ID NO:28, SEQ ID NO:29, SEQ ID NO:30, SEQ ID NO:31, SEQ ID NO:32, SEQ ID NO:33, SEQ ID NO:34, SEQ ID NO:35, SEQ ID NO:36, SEQ ID NO:37, SEQ ID NO:38, SEQ ID NO:39, SEQ ID NO:40, SEQ ID NO:41, SEQ ID NO:42, SEQ ID NO:43, SEQ ID NO:44, SEQ ID NO:45, SEQ ID NO:46, SEQ ID NO:47, SEQ ID NO:48, SEQ ID NO:49, SEQ ID NO:50, SEQ ID NO:51, SEQ ID NO:52, SEQ ID NO:53, SEQ ID NO:54, SEQ ID NO:55, SEQ ID NO:56, SEQ ID NO:57, SEQ ID NO:58, SEQ ID NO:59, SEQ ID NO:60, SEQ ID NO:61, SEQ ID NO:62, SEQ ID NO:63, SEQ ID NO:64, SEQ ID NO:65, SEQ ID NO:66, SEQ ID NO:67, SEQ ID NO:68, SEQ ID NO:69, SEQ ID NO:70, SEQ ID NO:71, SEQ ID NO:72, SEQ ID NO:73, SEQ ID NO:74, SEQ ID NO:75, SEQ ID NO:76, SEQ ID NO:77, SEQ ID NO:78, SEQ ID NO:79, SEQ ID NO:80, SEQ ID NO:81, SEQ ID NO:82, SEQ ID NO:83, SEQ ID NO:84, SEQ ID NO:85, SEQ ID NO:86, SEQ ID NO:87, SEQ ID NO:88, SEQ ID NO:89, SEQ ID NO:90, SEQ ID NO:91, SEQ ID NO:92, SEQ ID NO:93, SEQ ID NO:94, SEQ ID NO:95, SEQ ID NO:96, SEQ ID NO:97, SEQ ID NO:98, SEQ ID NO:99, SEQ ID NO:100, SEQ ID NO:101, SEQ ID NO:102, SEQ ID NO:103, SEQ ID NO:104, SEQ ID NO:105, SEQ ID NO:106, or SEQ ID NO:107.

6. The nucleic acid probe of claim 1, wherein the nucleic acid of part (a) comprises a nucleotide sequence that is identical to the sequence set out in SEQ ID NO:1, SEQ ID NO:2, SEQ ID NO:3, SEQ ID NO:4, SEQ ID NO:5, SEQ ID NO:6, SEQ ID NO:7, SEQ ID NO:8, SEQ ID NO:9, SEQ ID NO:10, SEQ ID NO:11, SEQ ID NO:12, SEQ ID NO:13, SEQ ID NO:14, SEQ ID NO:15, SEQ ID NO:16, SEQ ID NO:17, SEQ ID NO:18, SEQ ID NO:19, SEQ ID NO:20, SEQ ID NO:21, SEQ. ID NO. 22, SEQ ID NO:23, SEQ ID NO:24, SEQ ID NO:25, SEQ ID NO:26, SEQ ID NO:27, SEQ ID NO:28, SEQ ID NO:29, SEQ ID NO:30, SEQ ID NO:31, SEQ ID NO:32, SEQ ID NO:33, SEQ ID NO:34, SEQ ID NO:35, SEQ ID NO:36, SEQ ID NO:37, SEQ ID NO:38, SEQ ID NO:39, SEQ ID NO:40, SEQ ID NO:41, SEQ ID NO:42, SEQ ID NO:43, SEQ ID NO:44, SEQ ID NO:45, SEQ ID NO:46, SEQ ID NO:47, SEQ ID NO:48, SEQ ID NO:49, SEQ ID NO:50, SEQ ID NO:51, SEQ ID NO:52, SEQ ID NO:53, SEQ ID NO:54, SEQ ID NO:55, SEQ ID NO:56, SEQ ID NO:57, SEQ ID NO:58, SEQ ID NO:59, SEQ ID NO:60, SEQ ID NO:61, SEQ ID NO:62, SEQ ID NO:63, SEQ ID NO:64, SEQ ID NO:65, SEQ ID NO:66, SEQ ID NO:67, SEQ ID NO:68, SEQ ID NO:69, SEQ ID NO:70, SEQ ID NO:71, SEQ ID NO:72, SEQ ID NO:73, SEQ ID NO:74, SEQ ID NO:75, SEQ ID NO:76, SEQ ID NO:77, SEQ ID NO:78, SEQ ID NO:79, SEQ ID NO:80, SEQ ID NO:81, SEQ ID NO:82, SEQ ID NO:83, SEQ ID NO:84, SEQ ID NO:85, SEQ ID NO:86, SEQ ID NO:87, SEQ ID NO:88, SEQ ID NO:89, SEQ ID NO:90, SEQ ID NO:91, SEQ ID NO:92, SEQ ID NO:93, SEQ ID NO:94, SEQ ID NO:95, SEQ ID NO:96, SEQ ID NO:97, SEQ ID NO:98, SEQ ID NO:99, SEQ ID NO:100, SEQ ID NO:101, SEQ ID NO:102, SEQ ID NO:103, SEQ ID NO:104, SEQ ID NO:105, SEQ ID NO:106, or SEQ ID NO:107.

7. The nucleic acid probe of claim 1, wherein the probe comprises at least one detectable label.

8. The nucleic acid probe of claim 1, wherein the at least one detectable label is chosen from at least one chromophore, fluorochrome, spin label, radioisotope, enzyme, hapten, Quantum Dot, bead, aminohexyl, pyrene, and chemiluminescent compound.

9. The nucleic acid probe of claim 8, wherein the fluorochrome is chosen from at least one of 5(6)-carboxyfluorescein, Cy2, Cy3; Cy 3.5, Cy5, Cy5.5, Cy 7, (diethylamino)coumarin, fluorescein, tetramethylrhodamine, lissamine, Texas Red, AMCA, TRITC, IR dyes, Dyomics dyes, phycoerythrine, cascade blue, Oregon green 488, pacific blue, rhodamine green, and Alexa dyes.

10. The nucleic acid probe of claim 8, wherein the hapten is chosen from at least one of 5(6)-carboxyfluorescein, 2,4-dinitrophenyl, digoxigenin, rhodamine, bromodeoxy uridine, sulfonate, acetylaminoflurene, mercury trintrophonol, estradiol, and biotin.

11. The nucleic acid probe of claim 8, wherein the enzyme is chosen from at least one of soybean peroxidase, alkaline phosphatase, and horseradish peroxidase.

12. The nucleic acid probe of claim 8, wherein the chemiluminescent compound is acridinione.

13. A nucleic acid probe selected from:
(a) a nucleic acid comprising a complement of a nucleotide sequence substantially as set out in SEQ ID NO:1, SEQ ID NO:2, SEQ ID NO:3, SEQ ID NO:4, SEQ ID NO:5, SEQ ID NO:6, SEQ ID NO:7, SEQ ID NO:8, SEQ ID NO:9, SEQ ID NO:10, SEQ ID NO:11, SEQ ID NO:12, SEQ ID NO:13, SEQ ID NO:14, SEQ ID NO:15, SEQ ID NO:16, SEQ ID NO:17, SEQ ID NO:18, SEQ ID NO:19, SEQ ID NO:20, SEQ ID NO:21, SEQ. ID NO. 22, SEQ ID NO:23, SEQ ID NO:24, SEQ ID NO:25, SEQ ID NO:26, SEQ ID NO:27, SEQ ID NO:28, SEQ ID NO:29, SEQ ID NO:30, SEQ ID NO:31, SEQ ID NO:32, SEQ ID NO:33, SEQ ID NO:34, SEQ ID NO:35, SEQ ID NO:36, SEQ ID NO:37, SEQ ID NO:38, SEQ ID NO:39, SEQ ID NO:40, SEQ ID NO:41, SEQ ID NO:42, SEQ ID NO:43, SEQ ID NO:44, SEQ ID NO:45, SEQ ID NO:46, SEQ ID NO:47, SEQ ID NO:48, SEQ ID NO:49, SEQ ID NO:50, SEQ ID NO:51, SEQ ID NO:52, SEQ ID NO:53, SEQ ID NO:54, SEQ ID NO:55, SEQ ID NO:56, SEQ ID NO:57, SEQ ID NO:58, SEQ ID NO:59, SEQ ID NO:60, SEQ ID NO:61, SEQ ID NO:62, SEQ ID NO:63, SEQ ID NO:64, SEQ ID NO:65, SEQ ID NO:66, SEQ ID NO:67, SEQ ID NO:68, SEQ ID NO:69, SEQ ID NO:70, SEQ ID NO:71, SEQ ID NO:72, SEQ ID NO:73, SEQ ID NO:74, SEQ ID NO:75, SEQ ID NO:76, SEQ ID NO:77, SEQ ID NO:78, SEQ ID NO:79, SEQ ID NO:80, SEQ ID NO:81, SEQ ID NO:82, SEQ ID NO:83, SEQ ID NO:84, SEQ ID NO:85, SEQ ID NO:86, SEQ ID NO:87, SEQ ID NO:88, SEQ ID NO:89, SEQ ID NO:90, SEQ ID NO:91, SEQ ID NO:92, SEQ ID NO:93, SEQ ID NO:94, SEQ ID NO:95, SEQ ID NO:96, SEQ ID NO:97, SEQ ID NO:98, SEQ ID NO:99, SEQ ID NO:100, SEQ ID NO:101, SEQ ID NO:102, SEQ ID NO:103, SEQ ID NO:104, SEQ ID NO:105, SEQ ID NO:106, or SEQ ID NO:107; and
(b) at least one nucleic acid or nucleic acid analog that hybridizes to the nucleic acid of (a) under low stringency conditions.

14. A kit comprising:
(a) at least two of the nucleic acid probes of claim 1; and
(b) reagents and compositions for performing an assay to detect a change in chromosomal structure.

15. The kit of claim 14, further comprising a reagent to block non-specific binding of the nucleic acids to a sample of chromosomes, wherein the reagent is chosen from PNA and total human DNA.

16. A method for detecting a change in chromosomal structure comprising:
a) obtaining a preparation of chromosomes;
b) contacting the preparation of chromosomes with at least two of the nucleic acid probes of claim 1, wherein each of the probes of claim 1 comprises a different label so that each nucleic acid of claim 1 is distinguishable from the other nucleic acids of claim 1; wherein the labeled nucleic acid probes create an identifiable pattern of staining upon binding to a normal chromosomal control sample; and
c) detecting a change in chromosomal structure by detecting a change in the pattern of staining in the chromosome preparation as compared to the pattern of staining in a normal chromosomal control sample.

17. A composition comprising at least one of the nucleic acid probes as set forth in claim 16 and at least one blocking probe.

18. The composition of claim 17, wherein the blocking probe is chosen from one of a nucleic acid and a nucleic acid analog.

19. The composition of claim 17, wherein the blocking probe is unlabeled.

20. The composition of claim 17, wherein the blocking probe comprises a detectable label.

The application's sequence listing, which the Patent Office published only in electronic form, follows.

SEQUENCE LISTING (107 sequences)

SEQ ID NO: 1 - DNA, 126552 bp, Homo sapiens
aagcttcgccaggacacagggcctggcactgccactgacgagctgtggggtcccttctccctcgtgcgactcaccgaggatggaagacccggcgggaccttccggaccttcttgggctgcgtgtctgttagaagcaaaaggggtgagaaccggccaccggccatgagaacaacccctgccctacaccctggaggagagaccctcacaattcccgtttcatatattaaaaacctcgggtcggctgggtgcggtgcctcatgcctgtaataccaggactttgggaggccaaggcaggcagatcacgaggtcaagagatcaagaccatcctggccaacacagtgaaaccccgtctctactgaaaatacaaaaagtagccgggcgtggtggcgggtgcctataattccagctactcgggaggccgaggcaggagaatcacttgaacccgggaggcagaggctgcagtgagccgagatcgtgtcactgcactccagcctggggacagagaaagactccgtctcaaaacacaacagcagcagcagcaacaacaacaaaaagccccgggtctatttatacggctccaaagatgtcgaagaaccacgatggttttctcccgcgacgcgcagtttggaaaacgaggagttggtggattctaagccaaggctctgctgagaagccccttggccccaccctccttccaagatggccccgactatcccacgcagtcaggcttcaccactaggggctgctgtttgcaaactcgcctacaggataaaatccgtaacccggaaaccagcactcaggcgccttcctgatcactcacggacgtgcgcacagtgggaaaagttcgagtggcccaggcgcatgtgcccagccaaggcggaacagaggcctcctcccgcatcatggggctcctgtccttggtctattcagagccacgatcttttacgtttttgtgctttttgtgggtgatttcacgcttatttttttcaggcagggtcttgcgctgttgctcaggctggagtacaatggtgcgatcgcagctcattgcagcctcgaactcccagggtcaaaccatcctcctgcctcagcctcctgagtagctgggaccacaggtgtgtgccaccatacttagctaatttttaaaatttttcgcaaagatgggatctccctatgttgcccagaatggtttgcaacttttggcctcaagtgatcctcctgtctcggcctccagagaagctgggaccccaggtgagtgccgccatgcctggcgactgtgctgcctggaatgggccccgggtagttcaaggcgccgtccagtgctcctgagcccgaggctgtgacgtgcctcgcgggggatgcccgcgtgtgcagcagggctcagtgcagaggagccacgatgcagccccatgaggcatctgacacagaaagcacatggcagagcccgtgcccgtcagctgcaggaacctcgggaccagaggctcgtaggaacctctccctggacgtgccacgcccgccggcccctgcctcgaccccccgtcaccgtccatccctcccacggcccgagcgcccgacgtccagccaggacctggaaggtgcggggtctgctccctctggtgccctcagctaacgggaagcctcctacctccctttgcaggctccctcccagaagcccccgatgccccggccagaccccgctcacctaggctgccgtctgccgctctccgccgggagctgccggagtaggaggggtagtactgggaggtccccttcatgcccgaaggggacaggggcccggggctgttgagggccagctcgcctgacaggaagccagcctggtggggagcggatggtcagaaagcgcccagctggcatccagaccccaggctgttccattcaagaaaaaactgcaaaggccgaagccactcagacccgccctgcagtgggtgatgccccttctgcctgtcacggtgtttctctgtgacacctgctgtgtttttctgacttgagactgaccgcatcccacactgctgttttcacgaagaacgaaagactgagaaacagataccagtgtggccaacccaaggggctgctcccccgattctgagacgcaaagtacaaagctgcgtggctaagcgtctgtgcacccggctgcttcctatctttttggttttgttttgtaaagccctcggttggattctgtacatgttagtgtgaaacgggctttcttcctggggagccagggctgccctgagccgggtcccggaactgactcctgcatttcatccgttctaaggccgggcacggtggctcacacctattatcccagtactttgggaggctgaggcgggcggatcacctgaggtcgggagttcaagaccagcctgaccaacatggagaaactccgtctctacaaagaatacaaaattagccgggtatggtggcacatgcctgtaatcccagctactcaaaaggctgaggcaggagaatcgcttgaacccaggagacagaggttgcggtgagccaagattgcgccattgaactccagcctgggccatgagcgaaactccgtctcaaaaaaaaaaaaaagaatcatctgttctatcatcatccagtggccccacggggtggcccagcgcccaggacagggccttctcccgaggcccggcctgtcctgagcccgcaccctgtgtggccaccgcggggctcgatgagtcacccgggagcgccagagagcagggcccgagccctagttctgcttctcggatggggagcccgggcacttgcgtattcctgtctgtaaaatgggcacgtaggccgcggcccctcgttgcggggactgatagggaaacgcgcatctgcccctggcgcagagcctggcacccggctggccccctccatcactatggctactgttgctctggcttgggcacagtgagcacacagacggccccacctgtgacaaggccgagccccaccgagagctaggagctgacggcggggacagagatgaagtcctggggtgagggaggaaccctgggggtgcccagcaccggaggctgcatgggacccctgtggctggtcacagcccccaacatcctcccccagcctcacaaccagggccagcgtgggtgaggatctcggctgcacaggggcctgttgtatgggctccccagggggtccacacctgcaaagccctgctgcatggcctgttttcctgcctgccactcagaggagagggcaaccgagcccctccagctaagcatggcagccctgcaggccttggcctccctggtcctcacctacctcccctctgctcccggtccacacccacccagcccaccctggcccaagcccagcctggtttcgctatcaggaagcaaacataacctagctaagccaggagagcttctgcagatcagagagggtgggtgacagatttgtttaaaatcaaaatacaccccagcccggcccgagcccctcacctgagtcaggccgcccacgcctgcgtctctcccgaaggaggcataggcgccccgctcaccgctcttgcctgcaaggggagaaggaaggttagtgggaggcgaccccaaggaacatcctgagggcccccgagtgcctgccatgtgcctacaataggctctcagtaagtgcacacgactgagagcgccacggcaggatgctggcagagcctgaccccagtgtgcccatctcggggagccctggccccagtatgcccatctcccgcagagccctgccctcagtgtgcccatctcctgcccaatgacaggcttggggacaagaaggggtccccgatgatttcggggccaactctgagcatctgcagcccacagaagccctgcccagggggtggggcggaaaggggacagcagagctcacggggtgaggtgggaaggggacagcagagctcacagggggtgaggcgggaaggggacagcagagctcacagggggtgaggcgggaaggggacagcagagctcacagggggtgaggcgggaaggggacagcagagctcacagggggtgaggcgggaaggggacagcagagctcacaggggatgaggcgggaaggggacagcagagctcacggggtgaggcgggaaggggacagcagagctcacagggggtgaggcgggaaggggacagcagagctcacagggggtgaggcgggaaggggacagcagagctcacgggggtgaggcgggaaggggacagcagagctcacaggggatgaggcgggaaggggacagcagaactcacggggtgaggcgggaaggggacagcagagctcacggggtgaggcgggaaggggacagcagagctcacagggggtgaggcgggaaggggacagcagagctcacgggggtgaggcgggaaggggacagcagagctcacggggtgaggcgggaaggggacagcagagctcacaggggatgaggcgggaaggggacagcagagctcacagggggtgaggcgggaaggggacagcagaactcacggggtgaggcgggaaggggacagcagagctcacagggggtgaggcggaaaggggacagcagagctcacaggggatgaggcgggaaggggacagcagagctcacagggggtgaggcgggaaggggacagcagagctcacgggggtgaggcgggaaggggacagcagagctcacgggggtggggcaggaaggggacagcagagctcacagggggtgaggcgggaaggggacagcagaactcacggggtgaggcgggaaggggacagcagagctcacagggggtgaggcggaaaggggacagcagagctcacaggggatgaggcgggaaggggacagcagagctcacagggggtgaggcgggaaggggacagcagagctcacaggggatgaggcgggaaggggacagcagaactcacggggtgaggcgggaaggggacagcagagctcacggggtgaggcgggaaggggacagcagagctcacggggtgaggcgggaaggggacagcagaactcacggggtgaggcgggaaggggacagcagagctcacggggtgaggcgggaaggggacagcagagctcacagggggtgaggcgggaaggggacagcagagctcacgggggtgaggcgggaaggggacagcagagctcacggggtgaggcgggaaggggacagcagagctcacggggtgaggcgggaaggggacagcagagctcacggggtgaggcgggaaggggacagcagagctcacagtggccctgcttcctgctggccaggcccctgcccttcctgagcctcagtttcctctgtttcaggcgttgaggggctgatgccctggggtgctggggtcagaggcatttgtctgtcccaggggacaggcctgggggccctggcggggagccccggggcctgtgcacaccgcatcaggttcaccgcacaggctcccccaaagtgcccagcattcagccttcaggccagggttcattcgcgaatgagcacgtgacctgcaccccaccaatgagcacttccctggggcgctcagtgacaaaggacaggtgaggcctcggggctacggagggggtcagctggccagggcgagcccccagcatggaaggcctgggctacggaggggaacagctggccaaggcgagcccccagcatggagggcctgggctacggaggaggacagcctgccggggcgagcccccagtgtggagggcctggggctgatgcggtgacacctggatccagccttgcctgaagcaggcaccccgattactcaggacctgagccacttaaatccccttctggctgacactgggcacggaatgtgactggggctgctgtgaggggctgggacgcgcgatcgagtaatgtacattattctcaaagcaggaaaaaaatttcccgatttttgaattttaaaagttcaacgatttcccaactcctggaacaaatgctgctgttttttgcctcccgtttcctcatcttggtgacccggggggacatggggaagatgacagccacgacccaccccacaggccacacccggccacagcagtcactcgcccggctcctcgggtgagaaaactgaggccataggagactgaggttatggcaaaagccccccgtgcctccccgggacccccgcctgccctctccaagctgcctggctatggcctgggccccacccgtgggggtggcaggtgggacatggctgggctctgggcattgctggccgggccgtgggaactgcccacgtcagccctgcccaccctggggccatcgggggtatgaggaagaggctgggaggaaggaacagccagtgaggaaccaggctcccaggtgcaggggccacccccggcaggggggcggggccaggcctcacctaccccgtaaggggaacgggcagaaatcgcccgtggcacgtggtgggccctcagacacacccgccagaccttcacgctattcgcttcctactcaggacaccaactgactctactgtactccaagttcgaggccgggcaaagcgagacaggaccgtccctgccccgctgtggggcccaaacaggcgctgcccctcagggtccagggaaaaggctgggtcggccaaagtcctccgggcctcagtttccccgcaagccaacaatgccgaggggtacacggtgagcacctgggccccgcagcaggtccagtgccccacagctcccggcttctaagcagcgcacacccccactgcaccacgaaaagccagcagaaacactgcctcaaaccgtcgggttccagagaagggaaggatcccgcatcccaggatgactgagggatgaaaccacaaattccacagctgaggcactggggcaggaggctgaccacgacagcgggacccctgaggcccttaccagccccccaagcagcgggacccccccaagacccctacctgagcccccgaaccctggggcacaggacttgacactcccgcaggaggcggagcatgtgaagctcggggcatttcctgtgtcacccgcaggagggaccgcacacgggacactgtcccagtcgcagccccaggtgcctggaggagggcgtcccagtcagccccacccagccgcagacccccggccagggtgcccttcccaagcgtcggttcgttcccctgcagcacgggtgagcctgcagcggggctggaatatacccaagaccaggcaccaacccccacctggcattgggcagggcctgcagagctgggtcagtcctcaccgcctccctccaagaaggttctgggagggtccctttcccacagtggggaaactgaggctcagaagaggatggcgcttgcccaggttccgtggtggggtgggaccagacaccaggcctgagtcttcattctttttttttttttaagatggaatctcgctccatcacccaggctggagggcaatggcgtgatctcggctcactgcagcctccacctcctgggttcaagcaattctcctgcctcagcctcctgagtagttggcactataagcatccaacaccatgaccggctaatttttgtgtttttggtagaagcggggtttcaccatgttggccaggctggtctcaaactcctgacctcaggtgatccacccacctcgctctcccaaagtgctggtattacaggcgtgagccaccgagcccaacctgagtcacgattctctcggttaacaggagggccccccagggaaagagggcgggcgggcggtctgcggaagggcatgggctctgaccaccgcacactctggccgccctcccgagtctccagaactcctacgcctccttcccagcgggcacaggccagcccggctgacccctccccgggaagcaggaggagccctgcagaaatcccagggaggaagtggggtctggaacggcctccctgcctctacgctcaggcggggaagcctagttgcagagtgccgtgccagggagtccgggccacgtcccctgcacctccccgcagctgctcccaggacgggcagaggcttcggctgtccacaccctctgggtgaacgctggggacttgcctggcgctgtgcgtgcactgaccatgccaaggcccacgtctgcacatctgtgcacagcagagggaccgcaccaggccaggcactcacctccgagtcccggtcccaggaatgtggatgaagagaggctgctgtgcgactcagtgaagtgggtgccctcgctgaaggtctaggggagatggggtggggatgagaggtgctggggcttcacaggccccccctccaccccgcattacagctggagaggcaggactcaaacccatgtcccccagtccaaacccctggaaggctggccccttctctcagcctcagtttccccacacccctcgcccccaactctggggacaggaaactcagggtctcaggcctcacggggactcctacccggctggggtcaaaggaggagctgctctggtcgccgctgccccaggagcctgagctgggccggtcctcaagacctgcaggcaggacagagagagttatgggtcaccctcacgcctgcccagctctaaaagcttcggttcatcatctcaggggcaaacctcagtggacccggggggcttgtggaacccttcctaacccagcctcacccagcccgactcatgaggacaccagtcagcagctaacacccagacaccctgggactcggagcacttacaggtccataaacttaaattaactcttccgtcggctctctgctggccaactcctacccacccactaaagccccagctttcataccctccttgggcaaagacctcactctcacgccgagcctcctccccatcagccccaagtccctccctctggcccagccctgactatgtggactggggtctctgtgtcagatgcagactcttctgaccctgtgagaaaggctcatgacagcatgagggtgtggaagctaacccatgagctctggggaggcccagggtctccctgtccccacctgccagtgtgggaagtggggccgccctttgctgaagcagcagcagaggctcacccatcgggcaggaggctggcagcccgtgagggtggagccgaatctcatcacccaggaacaagcccagtgtggagaccagaagcctgcgtggggcaggagttcccggcgcagcaagggacgggacgaggaccttggtcccggggcggggcgggcggggcccttatctctcagaacactcacaggcaacgcccaggactccagaatcttctgccctgggcagggagggcctgcttggatccttcccccttccatcgggggccacagagcacacccgtggagaagcaggagcgggccctgggcctcctcagcttggccacggagttgctgccctgccttggtttccctctctataaatgatttacaaacaggccctacttttgcagggctgggggtgtccatgtccaactcccaagtccagaggcttcccgagagccaggcctgggggacccagcccagtgctgatgtctgtgaccggcaccacctcaggctgttctgcaggctcccccgccccgccccctgccctccctgctcatccacaccagaaacttctttcaaatcgcatccttctatttcggtgcctttgtgttaatcattccccccggggagtattggtgtttaattgctgtctgatttgcataattatgcatattaatctccaagtctaatgaatattcatgcgcctcatttagattttgttttctaatcaaaaatttccaatgtgattatgagtggggggctgggatgctgccttggctgggttgggggccaggcagggggctcctgtggtctccaggaatccacacggcattcgctgccaggtctgggccatctgcaccccaagatcctggtcctgcacgtgggccctggtgaacagggcagctgctgaggccagggtgggctggctgtgtaggggtgggcacagcgccggcaccctctgggtctcagtttgcctctataccacctgcatgttgtctggtcccctccggccatagccagtaccccaggaggtgcagagacccccaactgagcaaacgggaggctcctggcaccccagccctcatcccctggaaggcctggtgtggtgggggacctcctggggccccatgcccagggatcgcccccgaagttcactccaacaggcctgtgccagaggcactgcggcctcaatctgccctttgggggaaccctccctcacccagccttggcctcctcctagaaatgacaaaaataaggacagcccccacattaatacagttattaaaatcccccccaccgattaatgatgcattttaataacccaccatgaatattcataatgcatccattgctcctgttctaattaaaatgtactaatagaataagacactgctgtcagagtgtggttttctgtgatttctttggtgaagcaccgcagagttttacccgggaagggcaccttcctgccctgggccagcctggctgcctcgggagaggcctgcgagtggacggcgcaggggcgctggggagagggccccaggagcggcccaccccttgggcttcagttccaattccagtcacggggtgtggaagccgcccacctgcctgggctgccgtgaggataacaatgaaagatgctgcttcagagaggccatccgtagccaaggaatgctccaggctggtggtttcccagtcccggtccctgttgggtcccctcctgagagggaccggggactggtctttgcctggtggctcgttggcaaatgggagagggaggcttcaaaaggcgcttagtaaataccgggtaggactgagattggtctgcagcagggatctgcaaacagtacacaaggaccaagtctggcccctaagctgctttttaaataaagttttattggcacacactatgcccgtttgtccatgtactatcaacggctgcttttgctgcaacagtagagttgaatcaattccaatagagaccatctgtcctgcacagccaacaatattcactccttggtcctttccggagaaggctggctgaccttgatacagaaaaagactgtccaagtgccttcagctgcctctgcacaagaaacccaatcgacagacttcagtaccaggagtggggttaccatgccgggcaggcaaaactattggtggacacgggccctgaacacagccctgtgtaccgcccctgccaaaccctcaggcacaccaccaggtggtctggcttcagatgggcctggggacttcatcctatagccccagctctgcaatgtgcccccactcaggtgctcaggctaaagtcctgggagtcctcctcaccttccctcctcccaaagaacagcagcttgccccatagctacagcagcgggttaagcccagtccctgcagcagcttccttccaagtctgctgacatcctcaggcagccggatggagcctttagaagcaaaacttggctcttctccctccctctaccctctctcatggctccccaccgtcctcaggataaagaccaaactctttcctgatctcaccactctcctcttccccaacacaggaggtgacccccacccacaccccctgcctgagccccttcccagcctgggacccctctttgtctgcagcactgcctggaacacagctgacgcccccaaaacacccaccctcaacgtcttcattttactcataaataactgtgcttccaagaacattttcctggaggatcaaaatattctccacctctgctgtccaatacggggaccacactaccaactgctggaaacgtggccagcattttttcaagcacattaaaaattacatttaaaaatgtgtatatggctaatgcctgctgtactgaacaacccagtccccaaaagcaaatgaaataacagccaccaccaaataccacggtcacgtctaaaaaccaattaacacctcgacagctcctcacgcaggttccgtttactcgggagtaggagcgggccacccgatacagggtcactatgaccccccaagcccgtgcctcgccccgtctcttcttcctccttataattaaaatcgtgaaggaccccgatggcagcctgtcccaccgccctgcctgggtctggcccctgcagcttgtgatgcttctcagacccattcccagcccctctgggggtcatgacgggtgagatcagacagaggtttgaatccgggggtggcctttccttgggtggagcagtattttaaaaaattttttttttcttttgctttgagacagggtcttgttgcccaggctggagtgcagtggtgcgatcttggctcactgcaacctccgcctcctgggttcaagtgattttcccgcctcagcctcccacgtagctgggactacaggagcctgccaccacgcacagctaatttttgtatttttagtagagacggggtttcatacatgttggccaggctggtcttgaatcccagacctcaagtgatccgtctgcctcagactcccaaagtgctgggattacaggcatgagccacaacgcctggtgaatttaaaaaaatttttttgtagagatggggtctcactacattgcccaggctggtctcaaactcctggactcaggcgctcctcccaccttgtatttcccaaagccctggggtcacaggcgtgcacagcctccattttatctaaattcaagctatgggagaagatgaaagaccaggatgccctcggcccagctcgcgcactgcagccgccctgggtttatcttcctgtcgtgtcttcttggtcagggcccgcaggctgtgtagcacatgctcccagcttctgaggaggatcccgagtgggggagaaaatgcttctggggcaccacagagcccttccttgttggggggctgacgagatcccgcaaagcctcccacttcgatctgcctctaatgtctggcgatggggggtgggacagcagggccctgtggcccgcccgcgagcagacaaacctgaggctgaagagaatgtgagtggagaccacacaccaccctaagagtgggggtccccacagcacctaaagtggcaggacgtgccctcgggtagaggcacagtgaggctgtgcgggcaacacaggcaacctcctccgccagaaccggggacgcctcgcaacctcctccaccagcacgggggacaacctcctccgccagaaccggggacaactggcaacctcctccaccagaagcggggacaacctcctccaccagaaccagggacaagctcctcccccagaaccaggggcgcctcgcaacctcctccaccagaaccgaggacgcctggcaacctcctccaccagaaccgaggacgcctggcaacctcctccaccagaaccggggatgcctggcaacctcctctaccagaaccgaggacaacctcctccaccagaaccagggacaaccttctcccccagaagcaggggcgccttgcaaccccgctcccccaaggccctggggtttccctggagggcagagctggccccgagagtgggcatcgagcacagatgttaagtaacaactcagagaaacagggccccgctttgaatttcagtgaccacagagataaccgagaccccatcccgctcttgcttccatgtctatgggcatcaccagtgacacctgagtgtggggaccggagaacctgcccctcaaaacaagctcagaaaccaacccggggccgggcacggtggctcacgcctgtaatcccagcactttgggaggccaaggcgggcggatcacgaggtccagaaatcaagaccatgctggccaacagggtgaaacccccgtctctactaaaaatacaaaaattagctgggcgtggtggtgggcacctgtagtaccagctactcgggaggctgaggcaggagaatggcgcgaacccgggaggcagagcttgcagtgagccgagatcgtgccactgcactccagcctgggcaatagagcgagactccacctcaaaaaaaaaagaaaaagaaaaagagacacaagagggaacccaacatggaacaaaaaggatgaagttcaagaagttcaatgatttaccctaaaaaacgagaagactgtcttaagcctgtaagccccatggatcctcaaagaaatggcagagcctgggggttctatggaatgaagtagacagtgagcacatttaattacgaatcaagagattcctagaagccgtaacaagacaggcacacaaggaaagccctctgggggcactttgtgagttctctctcatttcactgaatccttgcagtggctacattacccctaccctacagataaggaaactgacgcaaaagatagatgccatttgctcaagccctcacagtaagtagcaaagtcactatttaatgatacaaatgtttcctagtaagatgcaaatacacaattatgaacagatacaatgtttttttgttttttttgtttgtttgtttgagactgagtctggctctgtcgcccaggctggactacaggcgcccaccaccgcgcccggctaatttttttgtatttttaacagatacggcatttcaccgtgttaaccaggatggtctcgatctcctgacctcatgatccgctggcctcggacaatgttttttaaaagtagcaatttattggtagcaaataccagcagggaagagaaatatacaggctcaattttcaccttctcacagaagggggcagatgcgatttcacttcggacgttgagagcgcgagaaacggcgtgtttaaacgtgttcttcacaacgcagaatactaaccgctattcaatcacggccttaaacgtgttattcaaaactagaaaagaaccactggcagagccgcaaagcggtacagagcttcagaaaacacacaccgggggaagcaatccggagttgggagcacacagatggaaaaacaaaataagacgatggaaggaaaagctgagaacgaagatggacgggtgcttaacgtctttaatctgaaaacacggtgccgaccaaagacagttttgaaacaagcgactcaggagatacaaccaggagcacaaagatctgccaagccacaccaacaaaaaggaagggttgcaaccttcatatcgaagtttcaattcaagggaggtttctttttctgagacagagtctcgctgtgtcgcccagggtggagtgcggtggcgcgatctcagctcactgcaacctctgcctcccaggttcaagtgattctcctgcctcagcctcccgagcagctgggattgcaggcacctgctaccatgcctggctaattttttatattttagtagagatggagtttcgccctgtgggccaggctggtcttgaactcctgacctcagaagatccacctgccttggcctcccaaagtgctgggattacaggcatgagccaccaccaccagccaaggaacggatttttttgttgttgacaatggctcgacccacaacgaaatcccactgtctcagcccacacaagcccacaatcctggcatctaaatacgtcaacagagaaaccgacaaacagaacagagggggatggcgctgctctcagcctgacattaaacagattaaaaatctaaatatggttcaaaggcctcgcagctccacatccaactatccctcaagtactcacaaagaaggacaaaaataatccatgtttcagcctcggcagaggagctctgcgtcctccaaacagtagctaccgtttaagccaaagctgagttttggcactggagatctagaaatcaagaaaggacctccaacttggaactcagaaacctctgaagcaacctgacctgaagaggaaattaggaaaaaaaaaaaaaaaaaaaaaaaggaacaaatgtcagtaatatgagaaaaacatgcattatggaaaccaatgggatggggttcacggggtggaaccctcaacaccacactgatggaacagaagagggcagaagtcagcaaaaggggcctgtgatctgaaagtcaccaaaaactttagaaagagaagaaatgccgataaagaggaaaattgatcaattgatcaatatcgatttgccaatgaagcagattctccagaagaaaaatcaacgagagagagaaaatgcacagggcagccgagtcaagaacaaagaaaccacctaaaagttggcgcattgaggaccgcggcgccctcagcctccctgcgcaggtggaaagacaggcgcctccaaacgttatcaaagagccgaacggggccaggcgcagagggtcaggcctggaatcccagcacttttggcacgggtggacagacaggcgcctacaaacattatcaaacagccaaatgaggccgggctcggtggctcatgcctgtaatcccagcactttgggaggccgaggcgggaggatcaccaggtcaggagaccgagactgtcctggctaacacggtgaaaccctgcctctactaaaaatacaaaaaattagcgcaatggttactaaactctctaagtttcagcttctttaccagtaaaatacggtaataattacacctatttcgctaacctgttagaactgagaattcccagtgaataagccaagctttgtgtccaatgcacagtgctcaagaaacactgatgtaagcagtggctcacacctgtaatcccagcacttcgggaggccgaggcgggcggatcacaaggtcaggagatggagaccatcctggctaacaaggtgaaaccccgtctctactaaaaatacaaaaacttagccggcacctgtagtcccagctactagggaggctaggcaggagaatggcgtgaacctgggaggcggagcttgcagtgagctgagatcacgccactgcaccccagcctgggtgacagagcatgactccgtctcaaaaaaaaaaaaaaagtgatgtaaattgttgtattactgatgttgttaaaaagttaatgaggcggccaggcgcggtggttcacgcctgtaatcccagcactttgggaggccgaggtgggtggatcactggaggtcaggagtttgagaccagcctggccaacgtggcgaaaccatgtctctactaaaactacaaaaaattagccaggcatggtggcaggcacctatattcccagctactcaggaggctgaagcaggagaatcgtttgaactcaggaggcggaggcggaggcggaggttgcagtgagctgagatcgtgccactgcactccagcctgggcaacaagagcaaaactcggtctcaaaaaaaaaaaaaaagttaatgaggcagcaataaaaagaaaaaaaaaagatacagccaacagcttggctggatctccagggaattatgctaacgtaacagaataaaagctaatctcagaaggttgcaaactataggattccatttacacaaaatactcaaagtgaaaaattgggctgggcacagtggctcacacatgtaatcacagcactctgggaggctgaggtaagaggatcacttgagctcatgaatacaagatcagcctggagaacacagcaagaccccatctagacaatatttttttattcttcagacacggtctccctctgtccccgaggccagagtgcagtggcgcaatctcagctaactgcaacctccgcctcccaggttcaagtgcttttcgtgtctcagcctcccgagtagctgggatgacaggcacgcaccaccacgcccagctaatttttgtatttttagcagagacggggtttcgccacgttgactaggctggtcttgaactcctggcctcatgtgatccacacaccctggcttcccaaaatgctgggattataggtgtgagccaccgcacccagctgaaatttttctttttttttaaacagagacagggtttctccatgttgcccaggctggtcttgaactcctgggctccggcaattctcccatctcaacctcccaaagtgctggggattaccagtgtgagccgctgacccagccctctacaaaatacatatttttttaattaggtggtcgcagctgctcacaaggctgaggtgggaggatcagttgagcccagaacttcaaggctacagtcagttatgatcacaccactgcactccagtctggacaacagagtgagacctggtccctaaaaaaaaaaaatcgtacagatgaagaacagattggtgattcctgggcttaaagaaggtgcatgtctcaaaactgcacagaactacacacacacacacacacacacacacacacacacacgcacgcgtacacacacgcacgcagacacagacgcagacacgcacacacgcgcagacgcacagacacgcacgcgcagacgcacacacacgtgcgcacacacgcacgcacacgcacagacgcgcacacgcacagacacacacccgcacgcacacacagacacacacacgtgcgtgtaaagccggtggaatctgatcaggatctgtggacggcaccaatgtcggcttcctaggtctgacgcagcaccacgggtgggcgggacggtacccctgggggtggctaggtgagaggagaacactctgccacttcctgtgaatcccgaaagacttcagaataaaaagtggatcaacttcaaggacgagggcccaagagagtaacagaaaattcaccagagagccattcacagggtcaatccccttccgagaagaccaccgccctctattaaacaagtggcaggtgaaaggacacgatctttgtcacctattaaatgagacaggccgtgctgtcaccacgttggccaggctggtctcgaacacctagtcccaggtactcctcttgccttggcctcccaagtgctgggattacaggcctgagccaccgcgcccggtcacaagggacgctttcaatgtgaaaaagcatccagggacccagcaattccactcccagacacgcacccggaggaaatgacccatgcgccaggttctcccggggtttcctcttaaagcagaacgcggaggtgccgttctgtggattttcactctgaccgtgtgtcacacttacaatcgcacggacagagaaagcgacggggaaatgaaaaataggaaagaactttcctttggtccgtcaataagcaatttcctggtgtctcccgtggcctcagagcctgtctgtcttggcagaagataggctgtcactcagagacctgtgcctgagggtttccaaaaatgggaggcggtgggtgggagaaggcgtacgaaaattattcccgttttaaatgtcttccgatccagacaaccagaaaatcttggtttcctattcgttaatctctaatgccttttttgtttcgtttctgttttgagacagggtctggctctgtcacccaggctgcagggcagtggcgcaatctcagctcactgcaacctccgcctcccaggctccagcaatcctcctgcctcagcctcccgagtagctgggaccccaagtgtgcgccaccacgcccagctaatttttgtatttttagtagagatgaggttttgctgtgttacccaggctggtctctaactcctgcgctcaagcgatccttccgccttggtcccccaaagtgctgggattataggcatgaaccactgtgtctggcccttttctgtttgtttgagttggggtctctcagtcacccaggctggagcgcagtggctcaaacatagctcactgcagccttgacctcctggcctcaagcgatcctcctgccttggcctcccaaagtgctgggattaaaggtgtgagccaccttgcccagtacctaactcctctctcgacaccaatttttaaatatttataaatatcgaagaacaggcagacccttcacaggggaaaacttatgtttaattaattttcagggacaccttttattctcacctgggtttctggttctcaaatctaaagtttcctttcaaatgaacttaagaaaagcgaggtgacttaaaagggagctagaacagggcacatgaagaaggggccaaggtggagaatgcggctggggtaccccatcagccatcagcgttggggactcctggcgaagggtggcgtccccgaagccaactaggccccgcctggaaggaagctgcacccactgttccaggaagaagccgaggtttgggaagggatcccacagctccggggctccatcctgctgatgagccccaaactcccctcttcctgggtcctcggagaggagaagcaggaagcggggaaatgagctactgcagctcctgggccctgccgggatccctccgcccctcgcacccatcgactcgctgaacctgacgatggaagagagcaggtgcccatcttgcgggagcttcgggagggccacacctggggccagcgccacagcctgcaggggcctgggggagtggaggcaatgaggagggtgccaccaactcaggccttggagctctgcatcctccaccacccccgggctcaggcgggcgttaactgcatggactgaacggggagggggtcacccctctgtgtccaggagctggggggtcccaggctggagcagccacatcacgtccctcaagggcaaaaaatgcaacatactgggcctcactgggccctccaaagcctccgccctaacgtgtgaggggacaaggcgagaccctcccaacctgcagcattggggcagggccggagcacagggcgagactctgtgggaaccacagaaaatacatctgcaaacattggcaggttcctgctgggaccgggctgggcgtccagggagaggcaacccagagggagcattctcaggtccacacggcctacacaccacagctctggttacccagggaccaatctcacagtggtccgtgccagggctgagggggtgagaggcgacaggggacgagggaagacacctcccaccccaccctccccaccaggccctgctgtaagcccacccagaggcccaggagaatgggggtggacggccttgggagttgcgcttcctcctccaggaagcccccagggcctgaccctctgcctcacacagggaagcattagcatgtccggttcctggggctgtttccggggggctggcagggtggcgtttggggatttccacgcctcagggagcatattccggccagccctgtggccacttcctcacgtagaggggaaggccagtgtgaggcagtgggggcagcaaagcgatgtctctccatgtgggggtgcaagtgcccaagtacagaaccccctttgcccaccactcaaaaccccgacactccagccagggcccacccctgggggattctggagataactgcaggacggcgctttccacccagatcccggaggcaggaaggacacagcttcagaggccccaacccgaggcccccactccccggaaagatgctgatgtccacaaagagacccgtggctctgaagcagcatcgggggcacccgccccaacctcccccaccaaatcctgtcgacagccagcctgggccgcccaaatgcacatcagactagaccctctctccattcacaaccatccagggctccccgctgcccctgcaacgaacacagcgcccctagcccgccccgccggccggtcccaccgcagggcgtccgtacgggctgctctctctgcctggcaaattcctcccctcatgctcccacggccccttcctctcaccctcagggctctgccccgacacgccctctgcggagaccttcactagaggtcccgctttggggcaacctggccctcgctgggtgtgccgtgaagccctgcccatgctccagagtgtgattttcaggccacccccaggaccccacgtctcccctatctgtcccgcccactgctgtgtcatcagcgagggtgacccgctcatccaggtcagcctgggatgtttctgctttgagcactcaaagccgcgggtcccaggaattgcccctcagtcctgggcaaaccacaatggccggtcaccctggtgctgggccctgcatacagcaagcgcctaatacctgcttaaatgaaagtcgtcgaggctcacaaggtgggtgggatccagtgagagccgggatcccgcaccacgccctctccagagcctcagtttcccccttatggattgactggagaaacggatgctcgagatccccacccacacacaggcccagctccaaccctgcgcctaaaaacaagccccacccagcccccagacccaggctccaggcgcgggagggacgaggggacgaggggctcaggggctcgggctcccaaggcaggtcacacgggcaacggcagctgatttcaggggtcttcaggctcgctgcccccgacccggcctgtgtggccctttccccattgtctccctcctttgctgccccagcctccctcgcccgcacactgtcttcaacagacccttgatctcctcactccacgagcgctggcaggaaggcggggtcctacctgaacctccgaactgcgccccggccagggaggcgggccggcccttcccgttggtgacaggcagcgggaacatctgcagggaggggaggggagacgtgagcggggcgggtggcaaaccaaaccctacagtcccgggttcaaacccaagctgggagcagagctggggacacccgggaacctgagactgcgctccatctaggcccggcccgtcctgctccgccccatcacagaccagaagactctgaggactcgcgtgccctcaagtgacgctgcaccctggacacccacgcccagagtgagaaaactccagacgatgaccccgctgtaccgccaggcagagtccctgccgctgaaaactcgctgttccccctgcctttgctctggggggaggggtatcccattaggcgaaggatacaacttatcagctcttgacagtgatacaaagttgtctttacgtttcagctctgaaaagtgagaggtttacactcaacaggtggacatgtggagagtccccggatgcctgagccctggctgactcctcgtttcctgtgtgtgcactggccccgcatggcaggccctggagcagggggtccctggagcggggggtagggcccagtgtccccctaccagggctgggtatgggtttgcttggcaaaaggggaagccgaggctcagacaggcagcaggtcgaggaagacacgggatggagccccgggcccggcaggaagctggaggggctggggagaggctgcaccccacagctgatccagctcctgggtgctaggggtgtgggactgccaccctccctcccgcccggctcacccgtacccagaacactaagtccctaaagattaacgggctcagcggcattaaccggaaaagccaacggcaacaaacccttttgccacagaaaaaaacacaacaagcctccgccctgccccaaggggctgcgttttaaggctcccatcggggcttaagtgatcaaagtggctggaatcagagccaggggctttctgaggagcagccaagatccccaacaccttccccagccagccaggaggcgaaggcacagcgcctgtggccacgatccacaggtccaaaggggacccaggaagcggggttgtcccccactccctggtcctgcagaaggggaaacggaggccgcattctcacctggccctggagaggaagaacggtcttgcgggtaggggtggcacccgcgctgaaggcagtgttcgccctggaccacaccccctcccgcaggctccggtgcacccagcctcccctggacccagacctccaagggccaacctctcatttgggaaacaaaggcctgctgtgggggacagccaactgcatttctatctgctttgtcccctaggacaccagggctgcaccaacgtgccacaggtcacatgggtaccgggctgtgtcctgtgggctctgcaggcctcatgagcagcccagaacagcccccgcaccccttggagcatcagtttcctcttctgagaaatggaccgagggctctggctgtgtgggacgtggtgaaacccaaaagcccatgggagtctcgcacgcggcagggcctggggagctcgcttccaacagcctcggtcctagggactcgctcccccttcattcctgaagcccctgactcaggcccagggactgcctgggacccaggcagggcatgtcagcccaggccagtgctggcgggtccttcgttcccgaccaaagctagcctgggtcagggcaggacaaaggcgcgctgggaacagcctgggttagcgttctccctcgtatttatttggagttccctgttctctcactttatacgcatctggtccagggaagtaagtgcttcccctaggacccagcctcggcaggggcagaaggcaggcatgcaggaacagagtggggatgcgggcagtcacaggggctgcctctgcctccccgtcctggccagggaggtggaactccacctctgggtaaagcccgaggggggacgcccggagaggacgggcacctcgccgctcccagcctgtttcctcatctgggaacggctccgacccgggatggggagacgtgctgagtggcttgaggtgaggagtcaggtcctggggctgaacctgtgccccctccccccaaacgctggtctgttccagcccagcggtctgtgacttgtcagtttaacaaaaaacaacccaactgcacctcgggttactcagccagggaagcaaaaataaaacggggcttaaaaataccagcatggcccttccggagccttggcccctccggcccttgggctgtttttttccgcagggtggccggtgttgtttcagtttggggacttttgtttttgacagacctcagtggcctgtgcctcataggcgggagggttaaattcagactgaaagtgccctcccccaacctgtttcaaccccaaacgctgccactgggcatggggggggggggggagcagaatttaaggacatctgtagacaggccagaagaaacaaaccaaggtccctgggcttctccaggaacccataacacatggccccactgtaccagcaggcaaaccgaggccccgggcctttacagcacccgtcagcggccggtaccccagggggctccggcattccagcctcactgcacctgcctgaactgtgtgacttctgaggaccagcaccctctgagcctccgttcacccaggtggagaatgggccgtacagggacagatccaaccacctaagactctgaagaagccgccccgccctccccaccgggcctgcctgctccgcagtgataaccgtggcagtcacaatggtggcgctgctgtctgctcggtggcccatgaattcccactcaatcccaatccagcctcctcctggcccaagctcggcttctggcagcttaacttcagcacccacgtgtgactaattaaccacacagtcagtttcatgcccgcatcctctgcccaccaggggagtcccgtatggggcaggttgtgtctgccctgttcacggagggtggtccgctcagcactgggcaccccctcctttacttctttgaggaaggatcttactctatcgcccaggaaggagtgcagtggcgcaatcacagctcactgcagcctcaacctccagggctcaagtgattctccttgcctcagcctcccaagtagctgggaccacaggcatctaccaccactcctagctaattttttgagttttgttttgtctttttgagaaatggggcctcactatgtttcctgggctggacttggaactcctggcctcaagcgatcctcccgcctcagcctcccaaagtgctggaatgacaggtgggaaccactgtgcccagcccccctcccatttactgaaacagggtctccagggtctcactgtcaaccagactggagtgcagtgatcttttacttacttttaatttttgtatctacaatgaggtaagcgaccctgatcaggcccattttacagatcagaagatcaaggccgcattttgcttacccagccaagctgggggcccaggaccatgcccctgaggactcagtttccccatctgtaaagcagtaggctgtagaatgctgcgtccgggcaaaagccccatagcacacgtgctgccgtgcgctgtcagcctcctgccagagagcggcccactcccccagccccaccggggcctcccatccaaacagctgaggctccatcgctgaagtattcagcaaacactctcccctgaaaaccttcccgtgaactgtggaggcaaaggggtgtcgggggctgggcgggggtcctggctcaccatgctgaagtccaggaggtcactgagctccttgtctgtgcccacaggcgccatcctctgcggctggttcattctcctggggccagggcgggcacctcaggcctggaaaccctgcttggtggatgtggggacagatggacagggagaaacagggaggggagaagagttgtgagtggtcaaagcacagagtgctaaaagccacctaaaaaaccctcaaccgccctggggtctgagttccagcagagccctgggggcacggggagccctgggagcaggcgcagggaagctggaattccagagtctaggtccctgcagagtcctccccagagaccacagggagtctgaaaaatggggggagggtgtgcaaatataaactccctaactcccccagggaacaccagggcatcaagttgccaagtttaaactgcacgcagggcagccagaacctctcctttctccaactctctcatttccaaccaaccccgggcttcctctgaggccccctacccccgggaaagggaggaacagcccgatcctaccccgccccgagggaaatttggtgattcccccctcccccagcagatggcacagcccgttgaagaccaggtcgcccccaaattcaacatgaaggaaatccacaagtcagaaaaccacgaaactcttttacaagcttcaagacttaaagtgccgggggtgggggggacgcgcatcctatgcagggaccagcaaagctttcctccaccctcaatctccctccccccaagaaaaccccaacagtattcaggaaagaaaaaaaaaacagccctagattgctttactgtcgcgatgtatccgggaattatttttaagcaaaactttgacaacatcccttgcctgccctccatgagcggggagagcgtctcaagaccagggtgctcccgcgtggtcccagggggctccattctaagatgggggatgggggatccacctgccaagacccattccacccccagaaaaaggtacagagaaaaatttccattccaaagaaatgcactccaggcccctccagtctcgactttccccaggggtccccaggtggggacgggggcagcccgggagacacctccgaggctgggggtggggaggagcctccgaggtcgagggagacccaacttcagaagcagagaaatcccctctttgtctgccaactggaggccgggtgtgaagcgggcgccccagcgcagcccctcccccgctcagtttttttcttttttggagggcgtgtgaaactgactttttttgaggactacgaaaccgcacttttttgtggggtagctgaaaccgattttaagacagacttagttgggggggtggcgagctaaaacgggcattctacgggagctggaagacttctggggcgtcccaaggactttgagagacttggagaatgtttgaagccactttgcacggcgccgaaggcggggggcgcgctggaacgcctttttcccggggggaggcggcccgggaagccggacccccctccccccgcagccggtgcaggcggtgcggcccgggagcctttgaagctcgcagcgcggccgccgcctcgccccgcattaacgcggagcagatgttacccgcgcgcccccccccggcccgcccggccccgaccagcgcctgcagcgcgcggcaccttccccgcgcagacaaaaggacgtccctcccgcgcgctccccaccccaaactccggcgcccgggccgggcccccctctacccgagaaagggggcgccccggggtccccgtgcgcccgggctgggggggacggtcctcgcgcctaagttgcacagcccgtccggcgccccccgcgcccccgcccggggctgcttaaagtttcccgaagtgcccggcccgacgggggcgacgcgggcctggcgagctccgggctcctccacgtcgccgcccccccggcgccgcgcgaagttggagaacaatgactcccgggccgcggggcgccccccgacaccgcccccgccccaacttcctccgcgcccccccccaacaagcgcgcgcggggcgggccggggttccctgggcacaaagcacgggggtaccgggcgcgccccccgccccccgccgggctcacctgctgggcgcggccgggcacgcggcgcgtgggggggggcggcggcatgaagcgggggggcccccccccggacaaaggtgcgtcgcggccgggcccccgagggtcgcgcgtgggcggcggcggcggcgcgcgtggcccgggcccctcccacccccgcgtggcccgtcccgcggggcccgtgcgcgcggccggccggggcgcccctggggcagcggcgtgcgcggtgcccgcggtgcccgccgccgcgtcggctccggcccgctacgcccgcagccgccgccgctgcctcatcttcctgcggcgggagacatgttccgccccccgcccgcgccgccccgccccgccccgtgcaggccccgcccctgccccgcccccgagtgccccgcccggcggcccacgcggatccctccgccacctccgggcggctcgggcccgaacgccctagctcggcctctcgagcaccctcgtgaggaccccgaatcccgtgaggtccagagcctgggagcggggacgcgcagaggaggcggtcgggccacggcgcggggagaaatcacggactatccccgtccgcggaagcacacacgagctgtgcgcttagtccatgacgcaagcgagtaaggcccgtgagattgaaagctaaggcagagcagtctggtcaatcggaagccgcgaaagtctgatgggcggggatcctagccattcgtggtgaggccccgcctcctttcttctcggccccgcccctcagcagaggcgggactctgcgagcgagaggccgcgagaggcggccggggtgggtcctggagttttgttctcaggttggcgtggccgcccgcgcggagccttctgcttggttatatttgcgttcctcgggccggccccgcgtgctgagtggtgcgagcgggtatcacggccccgagggggctacgtcagacccattttcccggcgggaaaaccgactctggctccggctctgggtcagagagccccgcggggagtctcagcggtgcctttgccgacttgagtctccgtctcggcatctgtgaatttggacctgactttggacagaactcaggccagatctggcttcctgattcttagtagtccgtgtctacattttagtaaaaagtgaccccgcctaggatcgggcgccgtggctcctgcctgtgatcccagcgctttgaaggaggccgaggcgggaagatcgcttgaggccaggagttcgagaacagcctgaacaacatagtgaaaccccccccacccacacccgtctctaaaaatatttaaaataatttaaaataataatttaaaaagttgaccggacgcggtggcccacgcttgtattcccagcactttgggaggccaaggcgggcagatcacctgaagtcaggagttcgagacctctctggccaacacggtgaaaccccatctctactaaaaatacaaaaattagccgggcatggtggcgggcacctgtagtcctagctactcgggaggctgaggcagcagaatcgctttcacccgaaaggcggaggttgcaatgagccgagagcacgccattgtactccagcctgggcaacaaggacgaaactccgtctcaaaataaataaataaataagtaaaataaaataaaaatacaaaaattagctgggcgtggtggcatacacctataatctcagctactcgggaagctgaggcaggagaatcgcttaaacccaggaggcagaggttgcagtgagcagagatcgcagcactgcactccaggctgggcgacagaacgaggctccgtctcaaaaaaaaaagtaaaataactaaacaaataaatgaaaataacacaatctcccagggctccctggggccccaaagggaaatttacactccactcccagcctgggaagatgccaccatctcgctggcccgcttggctccagccatcctgccctctggatggtccagaacttgctaagctcatccccaccccgggcctctacgtttgctttgtcctctacctgggaggcttttcccacccctatctggagcccctgagtcatcacagttcaatgctgcacctatgccaggccggcggggaggcggggccacaggggccccccaccaaagccacaagcccctcctgctatacacccaaactgggctgtccacagtccgaccctccgtgcccagagagttccacgtgccgcaggtctggggagagggctgtgggtcccagggtctgtgctgcaaatccctcatccctctccacctcactgtgacctcaggcaagttcgtgctactctccgggcctcggtttctccatctggacagtggaaggggggagtctggcacacagtaggtgctcacagctgatgcctgccttcctcagccgccccccacccccgcagaggcctctccggagccagggtctccaagcagctccaatcccaccccagcctcctcagcccccggcccttccttgtggcccagccctgaccccatgggtctgagggtgtctgtggccgggtctggctctccccattccagtgtagggagctcactgtgggccactccccacccacactcagggtccaagccatagtgtggcagccggagtcctcccgaggagcccttcagtttcacccacggaagggaagcaaccatccaatcacggacttcttcttcttcttcttcttcttcttcttcttcttattattattattattattttgagaaagagtctcgctctgttgcccaggctggagtgcagtggtgagatcacagctcactgcagccttgacctcctgggctcaaacgatcctcccgcctcagtttcccgagtagctgggaccacaggcacgcgccaccacacccagctaattttgtattttttgtagagacggggttctccctatgttgcccaggctggtcttgaactcctaggcacaagtgatcctcccgccttggcttcccagagtgctgggattacaggcgtgtgccactgcgccgtacaagactattcaattatcgggcactgacagcgaacggggccttgtgccgcgcatcgtagcactgtggacagtgatggactcagtccctgctgtcccggcaggatgacccatgagggaccccttgtctagtcctgaatgtggctctttcctgtgaggtcctcctgcctgtgtggttccacgtatcgtacagatgaggaaactgagactaggggtctcctccctgggccccagggcaccctggggctcgcgcctgccaggaggttccgctggtaaccacaagccaccattgttttccccaaggaggtcagtcctggggctgagtcactgggtggagcagcccgtgggggccccccacttggccaccacctctgcccagccccgaggcctgggtgctccctccagggccctggtacggggacaggcagcaagctatcctcctgactgtggcctttgttttgctctggggccgggcaggaggaggagcagggcctctgcacctgccgcctgttccctccacacctactgtgtgcgcccccgccaacatgaaccacgtatgtcagaaaaactgaggccaaggacaacttcccactagggagacacagaagcgaggggggcgaggggcggcgatggcgaggtttccagagacagacgcagtaggtgtgcaggccacagctgtccgcagagagactgggcttggattaggacttcggggccaccctccagatttctgtttccatttgtccctaaagtgggcacctttgacttctcccagggtatgaacacactcccccaacccccagcgccctccagcaggggcggagaagggagtggcggcccagcacttatcacccacgtcaggccctgggacaaacctcgctccggcgtccactgagcacgggcagctggggcgatcggtgtcgcctcccaaagtgggggcttcctgctcgagctcagacctccagtgaggggcctgatcccaacacgaccagatcaggaccaccccacagagccctgggctgggactcggccagggtagggcccattcccttattctccacaacttcgtttttattttattttagcagagatggggtgaggtggaaggatcgcttgagcccaggagtttgagaccagactggacaacacagcaagaccccatctcttaaaaaaaaatttttttttttagatgaaatctcactctgtcgtccaggctggagggcagtggtgccagctcagctcactacaacctccacctcctggggtcaagcgattctcctgcctcagcctcctgagtagctgggattataggtgcccactgccacgcctggctaatttttgtatttttttatagagacggggtttcaccctgtcgcccaggctggtctagaactcctggcctcaagcgatcttcctgccttggcctacccaaagtgatgggcttaccagcatgagccaccacacccggccccattcttcctgccttctgggaggaggcgtctccaggcttgctggttggacctgggcagggaagcctcctgagattgggagtgctaggggcttatgattgttctcccctagcggagggaggagattctggtgtgaaatggagcagtggggacacactccagttcctggggtctgatcacaagggttcctgactcctcgggcacttccagctatgaggacaccaaggaagggaagaggcttgtcggtgatcagacccctacccctccacccagacttatgggagccagagggccaggagagctgggcaggaggctctgaggttgacgggaatgggaacacagcctcacacctcctgctgtagggcattcaggggaagaaggaccatctcccacagggagtgggtcccctggggcagtgactcttgggctatgacctcaagatgcatgcggtcgacaggcagagagcggataccatgccaggcaggggaagctgagggacaaaggtactgaggtgggagggggtgtggggtgttcaaggaacggggcctgtgaggctggagcccagagaagaccagagaagaggagccaagatcagagagaggggcagggcctcctatgccacagggaggaattgggtcttcatggtgagaggactagggaaccatggtgggagtttgagcaagagacggacgtgatcacagggaccatgagttggggtggatctggggtacatttggaggataactgagggctctcccagggggtgggtatgaggggttagcagcctgcctactaggtgtggggttagggacctgggcctgtgaatggtggtatcgttctctgagtggggccagcgtgggtcaagggagaggcgtgaagggggaacaggaggctcatgtcccagggtggtgtccaggccccatgagacaaggcgggtcatggccaggaggggctgcgtgagagggggcaccagtgaagaaggcacagtccccagtcggggggagcccagctctggatgcagcctggcctccccgagccctccttctgtccgagccccccacgcagcccctctgcacctgccgggtgcccgtccaccccagggccagggccaactgccgaggatggtcccaccccctcttggccaggcgcccacagctcctgactcaggggcccccgggggcctgtcctgccacattccggggccgcccgtgcaaacacagggcgcctgcccatcaccccccatggggcattgtttggcccagttaccccgaggcgggggcagggcaggggacagggagcccagccagattctcagttcccgccacccatgcacctgcccacaggcagccctgctgacctgcacccgccttgacatggggggacggcgcctctgcagtgtaccctgggcacaatgggggcatctcccttcttcccgggggtcttcacctcccctgaactttgctcaaggcacagaggacgtcatcccattgttcagatggggaaaccgaggcaggactcaagtggcctcatgcctgaagctgagccaggctcccatccccggcccacctgtcctgtcccccaccgaccccacctcaccccgccaggctccttcacctgcacctggtgccttccagaaacgggggaggccactccaggctgtcagccctctggcacaaaggctgggaggtcagaagccatccagggacgccttgccacgctaagaaggttgggtttcattcgcgggtttggaggagccgagggggccacgtggtctcactgggggttgggaagggcatctgggagaccgaggtggaggccggtgacgtggctgtggagtgggatgcccaaggcaacaggaggggtggaaagagatgcctgttagacgggaaactgggggggcgcccctggggaaagacgacaaggatcctaggagggcggggagcacaggtgcccccaaccccaaggggtgagaactagactcaggaggagactcagggcttgggggctgcagggatggctgcctggagctgagcctgcaaagctggaacagggaggaagggtaactgagcagagggaacagcagaggcaaaagctacgagacgaggaaatgcaagttgttccctgggtttgggccgagggccagggggcgggggcgggtggcactgatggatgtgccacccacccccatccgggccatcctgtctggatccgggaccctgccctcgcccctccctccctccgtcagaccggccctgcactccacagacattgtatgtcttgctgctgcccagagcccgaaagtccctgcccacctccccgtctccgccactcctggttgtccctccaagcgcctgttggtttctgggcctgtttcctggctgtgtcctctcctggaacaactttcctctctttgtacctggctgtcttctcttcctcatccttccaccctcagcttgggggccacctcctccggggagccttccttgctttgtttgtttgtttgtttgtttgtttgtttgtttgtttgtttccagagacagagtttcgctcttgttgcccaggctggagtgcaatggtgccatcttggctcactgcaatctttgccccctgggttcaagcaattttcctgcctcagtctcctgagaagctggaattacaggtgcctgccaccacgcccagctaattttttgtgtttttattagagacggggtttcaccatgttggccaggctggtcttgaacttctctgacctcaggtgatccaccccccttggcctcccaaagttctgggattccaggtgtgggccactgtgcccggccttggtcggcagttttctaacagctgggggtggctgcgtgtgagacaggagagggtgagcaggaggtgctgggatcagaagaggctcagcaaaggttggccccacacccagcccccttgtccttttcaggcatagagaagatacaaaatccagaaccatgcaaggagaaaattcttcaaatttgaccacacaggccagacacggcagctcatgtctgtattcccagcactttgggaggccaaggcggcgggatcacttgaggccaggaggttgaggccaaccttggcaacatagcgagaccaccatctctacaaaaaaaatacaaaaattaggccgggcctggtggcatgtgcctgtagtcccggctactctggaggctgaggcaggaggatcacctgagtctggggaggttgaggctgcattgagccatggttgtgtgactgcactccagcctgggcaacagaacgagactcagactcaaaaaaaaaaatgttttttaggctgggtatgatggctcacgcctgttatcctagcgctttgggaggccgaggtgggcagatcacttgagatcaggagttcgagatcagcctggccaacatgatgaaatccactctgtactaaaaatacaaaaattagccgagcacagaggcaggcgcctgtaatccgagctacttggaggctgaggcaggagaattacttgaacctggaaggaagaggttgcagtgagccgagatcatgccactgcattccagcctgggacacaagaatgagactctgactcaaaaaaaaaaaaaaaaaagtttttcgactacataaaaattaaacacttttgtgtggtcacagactcacaatgaagttagatgagatgagaaagctagggagaaactatttgcaacatcataacagacaaagggtttgggctcttcgtatacaaagagttccaacaaatcaataaggaaaaaactcaaaaaaaaaaagaaaccatgcaaagaaatgagtgattaattcatacaggaaaaaattaaaatggccactggatacacagacgaataaaaaacctaaagtcactcttggtgaaaaagatacaaatgggccgggcgcggtggctcatgcctgtataatcctcgcactttgggaggctgaggcgggcagatcacgaggtcaggagatcgagaccatcctgtctgatatggtgaatccccatctctactaaaaatacaaaaaatcagccaggcgtggtggcgggcacctgtagtcccagctactcgggaggctgaggcaggagaatggcgtgaacccgggaggcggagcttgcagtgagccgagatggcgccactgcactccagcctgggtgacagagcaagactctgtctcaaaaaaaaaaaaaaaaaaccaaactaataaatctaataaaaatggtggcatgaccactgctcacccatgccaaggccgttttttaaaaacaagacaaaacgtgacggcatgagcagggctgtgcattagaacgtggtttgtggcacagaacacttgatttgaaaactgcccaagtgtccaacaacaagggctgtagaagaagattctgtcatggctgcactaggaacccgactgttgaccgtccagcaagtcaggttcccgtgcctgcttggagccaagagacgcctgaggccgcctctctgggggaatgaaatacaagttaaagacccgccatgccacttttggttgaagcttttgtaaaggaaaaaagcatattgaaaaagtgcaggaggaaatgccccaagggcttggtggttactctgggggtgggggacactttcagttcttactttatcttttttttttttttttttttcactctgtcgcccaggctggagtgcggtggcgcgatctcggctcactgcaagctccgcctcccgggttcacgccattctcctgcctcagcctcccgagtggctgggactacaggtgcccgccaccatgcccggctaattttttgtatttttagtacagacggggtttcaccgagttagccaggatggtctccatctgctgacctcgtgatccacccgccttggcctcctaaagtgctgggattacaggcgtgagccactgcgcccggcccttactttatcttttgaagaggcaggattagcttgagagtttacattggacattattttctcttttccttggttgaaaatgtttgttttgggggccgggagtggtggttcacgcctgtaatcccagcccttcgggaggtcaaagtgggaggattgcttgagtccaggagttcgagaccagcctgggcaacatagcaataccccatctctaccataaattaataaataaaattagccaggcatggtggtgtgcaactgtagtcccagctactagggaggctgaagtgggaggatcccttgagtccaggagttggaggctgcagtgagctatgattgtgccactgcactccagcctgggggatagaccgagaccttgcctcttaaaaaaaatttcattttgacaatatgcataaggccacatgcgtgaagctcagttggaatgtcacttgcaacatcataagaggcaaaggatttgggttcttcatatacaaagagttccaacaaatcaataagaaaaaactcaaaaagaaaaccatgtaaagaaatgaatgattaattcatacaagaagaaatgcaaatggccactggatacaaggccacagaatatttggaaggtgaggctgacaggagagctgctgtcctggagacattgaataaatactgccaggggccgggcacggtggctcacacctgtcatcccagcactttgggaggacaaggtgggccgatcatttcaggccaggagtttgagatcagcctggccagcatggcgaaacccccctctgctaaaaatacaaaaattagccaggcatggtggtgtgggcacctgtagtctcagctactcaggaagctgaggtgggagaatcgtttgaacccaggaggcagaggctgcagtgagctgagattgtgccacagcactctagcctgtgtgacagagtgagattccctctcaaaaaaaaaaaaaaaaaaaaaagactgccagcatccacttcatcttcatgttctaagatgatggtttatctttgtgtgtattttatgttttttagttttaattttttttttttaagagatggggtctcagctgggcgtggtggctcacgcctgtaatcacagcactttgggaggccgaggcaggtggatcataaggtcaagagatcgagagcatcttcgccaacatggtgaaacctcgtctctactaaaaatacaaaaaattagccgggcatggtggcgggcgcctgtagtcctagctactcgggaggctgaggcaggagaatcgcttgaacccgggaggtggaggttgcagtgagctgagatcgcgccattgcactccagcctgggtgacagaatgagactccatctcaaaaaaaaaaaaaaaaaattagctgggcgtggtgggcgggggtggggggcgcctgtaatcccagttactcaggaggctgaggtagcagaatcgcttgaaactggaaggcagaggttgcagtgagcggagattgcgccactgcactccagcctgggcaacagagtgaaactgtgtctcaaaaaaaaaaaaaaaaaaaaaaaaaaaagatggggtcttactctgttacccaggctggagtgtagtagcacgatcatggctcactgtagcctcaaactcctgggatcaagccatcctccatccttagcctcccaagtagctgggactgcaggcatgtaccaccacacctggctaatttttctttattttgtttgtagagacgggatcttgctatgttgcccaggctggtctccaacctctggactcaagccatcctctcattttggccttccaaagtgttgggattacaggcatgagccaccatgcccggacccccgccaccccgctttttttttttttgagacggagttttgctcttgttgcccaggctggagtgcaatggcgtgatctcagctcactgcaacctccacctcccgggttcaatcgattctcctgcctcagcctccctggtagctgagattgcaggcgcccaccaccacgcccagctaattttgtatttttagtagagacggggtttctccatgttggtcaggctggtctcgaactcccaacctcaggtgatcagccccacctcggcctccgaaagtgctgggattacaggcatgagccactgtgccctggtcccggccgctttttaaaattaaagaatgtttagtttttcacctcaccatagatgctgcatgactgagattgcagaaccacagaacgggcgtgggtgggcttccaccggggcaccccctcctcctgcaggatccgcactgcccgggcatttccctgggggtggggaggcctcttgctgtcccagggttccctgggggaaacccctggtgtcctggggaggccccaccaggttgatcgtgagcttgagctcagggcaaggagcactgctcagcgagtccactgtggttgtggtcacacgatggtgtgagctctcatctgtcaaaggagtttaacaagagcacccaccagggtgagttcaatctgtccatcgaacgcaacaggcccaggccccggaggcttttagggcccatgaaaatgtctgtcttccttcctccctccctccttccctccctctctccctcccttcctcccttccttcttttctttctctctttctctctctttctttctcttctttcccttccctccctcccctcccccctcccctcccctccctccctctctctctgtctctttttctttctttctttctttcttcctttgttgcagagtcttgctctgttacccaggctgcagtgtgatggcacaatctcggctcgctgcaaactctgcctcccaggttcaagcaattcttctgcctcagcttcccaagtagctgagattacaggtgcccactaccatgcctggctaatttttgtatttttactagagatggggtttcaccatgttggtcaggctggtctcaaacccctgacctcaggtgatccacctgcttcagcctctcaaagtgctgggattacaggcatgaaccaccatatctggccaaaaatgttttaatttcttttaaaatcagggccgggcactgtgtggctcacacctgtaatcctaacactttgggaggctgaggcgggaagatcgcttgagcccaggagtttgagaccagcctgggcaatacagcgagacctcgtctcaaaaaaaaacaaaaacagaaacaaaaaaacaaaaagccaggcgtggtggcaggcacctgtattccagctactggagaggctcagacaggaggatggtttgagcccaagaggttgaggctgcagtgacccaagtttgtgtcactgcactgcaggatgggagacagagtgacaccctgtctcaggaagaaaaaaaaatttaatcagaagaaaaatgatgaataataattgttttccgatgaacaataataataacgaattaaggccgggcacagtggctctcacacctgtaatcccagcgctttgggaggccgaggcggacggatcatgaggtcaggagttcaagaccagcctggccaacatggtgaaaccccgtctctactaaaaatacaaaaattagctgggtgtagtggtgggtgcctgtaatcccagctactagggaggttgaggcaggagaatcgcttgaacctgggaggcagaagttgcagtgagccgagatcgtgccactgcactccagcctaggtgacagagtgagactccgtctcaaataataataataataaattaataataacaattctagtctcaattttacttttttttttcaatagaggaaaggactcaggatggcaaaagtgacttggtcccagacagccctacagggcagtcctgcccgggaaggagcaggtgctctctgctgctgaggcccctagcagaggctgggcctctgggtctcccagcaggtggcaggggtgtgagaaggggaggcccctttccagaggccagggacggccccaagggctgcccgggagatactgggtcatgtgaccccccggagccaccccctgaagcttggtctcaggttttctatttgcttcagactcttgttagtcccccccagctcctgctccatcaggcctggcctccttatcaccccggctgtctgggtgggggcatggccccctcgtaacctcagctacctgcagggcagggcagaaccccgggtctccggccggtccgtggccggtatgtacctcacgcatacagtctgcacactgggcagagacagacaagaaattcaccagccactcctcactcctgtcctgaccctgaacctgaccctgtcagggagacctgggctgagacgggatacagaactgggtacaggagcctgcagctagggctgagtcagggcaggcccaggggcacgggaggaatccaggggacacagcaaactggagaggggcgggaagcatgtgccctgcacctggccgggccctacttctcccttccttctcttcctcctcttcctcctcttttttttttttttttttttttgagaaggagtttcactcttgttgcccaggctggagtgcaatggcgtgatttcagctcaccgcagcctctgcctcccgggttcaagcaattctcctgcctcagtctcccgagcagctgggattacaggcacctgccaccacgcccggctaattttgtatttttagtagagacggggtttctccatgttggtcaggctggtctcgaactcctgacctcgggtgatctgccctccttggcctcccaaagtgctgggattacaggcgtgagccaccgcgcccggcctctcctcctcctccttcttccttcttctccttattcgttattattattttgagacaagttcttgctctgtcgcccaggctggagtgcagtggcgccatcttagctcactgcaagctccgcctcccgggttcacgccattctcctgcctcagcctcccgagtagctgggactacaggcgctcaccaccatgcctggctaattgtttgtatttttagtagagacggggtttcaccgtgttagccaggatggtctcgatatcctgacctcgtgatccacctgtctcggcctcccaaagtgctgggattacaggcgtgagccactgcacctgaccacaccctgctgatttttattttttgtgtagaggggggtcttgctgtgttgcccaggctggtctcaaactcctggcctcaaggaatcctccacttcagtctcccacagcactgggatcccaggtgggaacgccctggcctggctgaccctgaactttttttttttttttttttttgagacggagtctcgctctgtcgcccaggctggagtgcagcggtgccatcttagctcactgcaagctccgcctcccgggttcatgccattctcctgcctcagcctcccgagtagctgggactacaggcgcctgacaccacgcctggctaattttttgtatttttagtagagatggggtttcaccatgttagccaggatggtctcgatctcctgacctcgtgatctgctcgcctcggcctcccaaagtgctgggattacaggcgtgagccgccgtgcccggccgaccctgagctttattttgtctcggaggactccactgccctccatgtccggcctcccgagccccctctgcccacctccctccagctgcgctggccacctcctcgctgctgcttggacaccgttttctccctgtgacctcagggtctgtgcccaggatgtccctcggccgggagccgttcctccccactctcaggcccctttgccggtgtatcatcagtttatcgttcctcccactctcaggcccctgtttctcccccttgcgcctgtggggcttgcctggctctgtaaggggagccccgggcccagcctggccgccccacacctccagcatccatctggggcctgacacacagtaggtgctccataaatgcacaggctaagttggggggttccccatcttacaggtgaggaaactgaggctccgaagagggcggcctgacaggcatctgggagccccggcccaggcgaaggtatttcctcctggcccagggcgccgtggggtcccggggcagctggtggggccgccaaagggtggccgtgtgtgtggcggtggcagctggggctctggcagtgggggagggtgggcgggaggcagcagctggtggctggccccaggccagctggagcctgtgcagagggagggcgctgggtcggctcacgctgcctctgggtccccttctgagtccccctcagcctttctcggttggtctccatctctgtctttgtctctctgtctctgtctctttctgtctgtttctctctgtcttctttctctgtgctctctctgtgtcagcctccctgtctctgtctctttctcttccccatctctgtctgtctttttgtctctgtctctgtttctttctgtctctgcgtatctctttctgtccctctgtctctgtcagtctctctgtgtctgtgtgtgtctccatctctctctgtctccatctctctcgttgtctctctgtttctctttatctctttctgtctctctctgcctgtctctctgcctctctgtctctctgtttctctgcctgtctctctctctgcctctctgtatctctatctctctgtctctttgtctgtttctgttcttctctgtctccttctctgcttctctgtctccttctctttctgttcctatctcttgtctttttctctgtctctctctgcctctctgtctccctctgtctctgcctctctctccttccccttcacactggggactcccctgactggcccggacaggggctggttacactgctgcaccctctcttccagacctcccgctccaccccactccctgctgcctgcacccctgcgtcagccagcacctctgtgctggcatgaaggtctctacccaccgggaggagcccaggaccctctcacgggctggggaccctgtgcgcatcgctccccctgtgagcctgcatttccccacatgcagggtgtttgcagagccctctcagagcggtgctctggggaaccacagggcagaggtctcagcccgtcggggctcccagccagatggggaaggagaatttcgaaggaatcgccttacaggcatttgaaactctgcaggcagaggccaggggaatcccgggtggaggagcaggcagggtgagggccctgagagtccctccccgggttaggagcaggcagggtgagggccctgagagtccctccccgggccacccccagccacactcccccgtcacacagggaacctggcccagttgcccgtacccactggtcctggggagggcagctgggaggggctgtgtgtgcactaggggggcggagctgggactccccccaaggaccctcccttccgggatctacacccctgatcccccctcgccagcacatccacccaccaccctcgcagacaatagaattcatcactgtagaaacatcctctggggctggggcttaatcagttcctgatttgcatttttgcatattaatgacagcagagctgctaattttggcacatgattttaaaggtgcagtagctctgaaactacggaggcggtgagggggtgaggaccggggccttcctcacctggcctggggggtgctggccctcaggttacaggttacagggtctctgccctgggagcggcccctgcctctgggagctgcagggacccttggggattatggggtccctgcctctggggctcacaggaatcacagagtctctgccactctatctttctttccttcccttccctccctcccctccctcctctctctctctctctctctctctctctctctctctctctcgctctctctctctcgctctctctttcctttctttccttcccttccttccctcccttccctccctcccctctctctctttcctttctttcctttccttcccttccttccctccctcccctccctcccctctctctcctctctctcctctctctctctctctctttctttcctttctttcctttccttcctttccttccctccctcccctctctcctctctctctctctcgctctctctctctttcctttccttcctttccttccctccctcccctctctctctctctctttcctttcctttccttcctttcctccccttccttccctccctcccctctctctctctctctttcctttccttcccttccttcccttccttccctcccttccctcgcttctctctctctctctccttcccttccttcccttccctccctcccccttctctctctctctttcttttcttcccttccttccctccctcccctctctctctctttcctttccttcctttccttcccttccttccctcccttcccccccctttcctttccttcctttccttctcttccttcccttccttccctcccttccctccctcccctctctctctctctttcgttcctttccttcccttccttccctcccttccctccctcgtctctctctctctctctctctctttctttctttctttcgctcttgttgcccaagctggagtgcagtggcacaatcttggctcactgcaacctccgcctcccgggttcaagtgattctcctgcctcagcctcccgagtagctgggattacaggtgtgcgccactatgcccagctaatttttgtttgtttgttttttgagacggagttttgctcagtcgcccaggttggagtgcagtggcgcgatctcagctcactgcaagctctgcctcccgggttcacgccattctcctgcctcagccttgcgagtagctgggactacaggcgcccaccactatgcctggctaattttttgaatttttttttagtagagacggagtttcaccttgttagccaggatggtctcgaactcctgacctcaggcgatccgcctgcctcggcctcccaaagtgctgggattataggtgtgagccaccgcgcccggcccatgcccggctaactttttgtatttttagtagtttcaccatgttggcaaggctggtctcgaactcccgacctcaggagatccgcccacctcggcctcccaaaatgctgggattacaggcatgagccaccgcgcccggcccactctttttcttctcttttgaggcaggatcttgctctgttacccaagctggagtgcggtggtgcaatcatagctcactgcagcctccacctcctggctcaagtgatcctcccacctcccacgtggctcggaccacaggcgtgtaccaccacactagcctaattatttaaaattttgagtttgggtgccgtggctcacgcctgtaatcccagcacttcgggaggcagaggctggtgggtcacttgagatcaggagttggagaccagcctgaccaacataggggaaccccttctctactaaaaatacaaaaattagctgggcatggtggcacgtgcgtgtaatcccagctactcgggaggctgaggcagggagaatcgcttgaacccaggaagcagaggttgcagtgagccaagatcgctactgcactccagtctgggcgacagagtgaaactccgtctcaaaaataaataaataaatacatttttgtaggacaggggtcttgctatgtttctcaggctggtctcgaactcctgggcttaaatgagccttctgcctcagccacctaaagtgctgggattacaagtgtgagccatcacgccctgtctttgccactcttgcatttgggcatcaacgctggcattggccaggggaactgggattctggaattttctccaattggctccatcctgagaatcccatatttggaaagctgtgaattcaagttccgagtatcttaaaacctttggattttacccatcgaggctgaggatagtaagaatatttaccggccaagaatatcactttaaaaaaaaatcaaaacaaacctttgtattctctgtcctaggtagaccctaaatcctgcccttgtcctcacctcctgcgctcagatcggaaacctgggacctttgcctccaaaccccaccccacaatcccgcccaggctcaggactcagttcccttcgcccccaccgcgccctcccccggccctctgcacctgccgcgtcccgtacccggcctgctcttcttcaccattggtgccttttccttcaaccccacctccccagggaagccctcctggtgacttcaccacgcctgtgtgttcagttattctccctctccctgggaggtggggaaaccgaggcatagagcggcgaggctggtgctcacggccccccggggtcctccccagacccctcccctccctgtggtccgggggtgcatggggtggggcgcgggggcctcgctggtcctggggttcagtcgggcgcgcgtgctgccacctggtggccaatggggcaaggccgcgggtcctccccgggcgtcggggcccccaccccacggagcccaccctgcgctgggggaggtgggctcaggaaagccgcggcccccgctcgggacgccaggggtgggggacacggagcttcgccagactcccccaaactcgggcgcgtcatgggaagaatggagggagctggatgatgggggtcctgcgggctgccttccctgggtcttctggtgttgtccccgtcccgtccccttcttacccctgcgtgacgcccagaccgagggaggtgggactgggacccccttccagggacagagctgcagcgggtctggcgtccaccagggcgcgcccgcagcccagaaacccgcgggcgctccccacgtgcgcgctcacacgtgcatccgcggctaccccagtgcctcgcggctcgggctttttttaatttttattttatttttatttttttgagacggagtctcgctctgtcactcaggctggggtgcagtggcgcgatctcggctcacggcaacctccacctccctggttcaaacgattctcctgcctcagcctccagagtagctgggactacaggcacgtgccaccacgcccagctaatttttgtatttttagtagagctagggtttcaccatgttggtcaggctggtccccaactcctgaccttgtcatccgcccacctcggcctcccaaggtgctgggatgacaggcatgagccaccgcgcctggccggctcaggcattttgacccgaggcacacgtggtcctgtgtggttggtgtgtttctgaatgaacagtgttcacgtagattcaggtgtgccacacgtgatgtatacggggcatgcttatgcgtgttctcgcatgctcgtgtgcattctagcatgtgtgctcactcctatacacaggtttgcatgcgtgtgctggcatgtccgtgtgggtgcacacagaggctgtgacatgttcgctcgttgccacgagctcaggtgtgtttgtacatggtcagtcccgtttatacatgtgcacgcatgggcacgtatgtgccaggaaggttcacacatacaccttctcatgtgcggcctgctgtatctgcacatgtgtgtcctggtaaacgcgtgtgtttgcgtgttctggtgtgcttgcgcatgtttgtgtgtgtgcatgtgggcgcactcacagccacagcccatgctggcgtccctgagtgcaatggccccttatggactgggtcctacaggacacccctgagtcaggccccacataccccagggccctcccacagctccactgccccaaaccccctggccctgtgagccgatccctgcagccaaagggtccaggtcgcccccagtcagcctctccctggtctgccccaacccccagctctccactcgatctcccccacttcagtggctgcagcctcctgcacccgcaccctcttcctgctgtggtggcttctgggtccggtccccagtcagccccagctgctgcctgtgcccccaagagatgcagagctcttaggaggcagggccgtgtctggggtccacggctgcaccctgatctctggtatccagccggcacgcggtaaccaggtcagaagcctaaccgtccttcagccgggcccagcagctcccgtcgctatgggaaatccatgctcagctcccacaaacccagcagtcaccagctggcctcagccagaggttcccctgtcacagagcctgccaagcagagaccctcctgacactcactcaccccttcctctccagtggtggggctggatgagcgggccgcctccctcctctttaccgttccctctccacctggcaaactcctattcatcctgtggggccctggaacatgggccccacttctaggatacctaccccagtcctgggggtgaatggaccagaagctaccttggagagcagaccaggtgccagctcccaggctcccagccctcctgggtgaacttgggtggtggcagctgcgtctcatttccaagccaagcctgtagacaggagcccaatggcggttagtcaatggcagaccgccagggaggggtgaatgctggttcccaggctgtgtcaacatagccaaccagctgcccaggaggctctgatgtgaggaccgtacccactgctggtgcctccctccctccctccctccctctctgtctctccctcccctctgtccctccctcctttccttcatccctccctccctctgtccctctgtcactccctggccctggccacccacacagcccccaagggccatctccttggcaacagtggccacaaggtcgtctgctggatcaatctcctctcacccctgcagccccgaccccggacccggaaggtgacaaggaagtggggtcaggcctggcttcccgggagggacccagtgtgtgtaggacagggggggtcctttggctggagcaggggtggcaggactcagatagggtgagccggtccctgttgagagggtcagcagggccaaaggtccggcgagccctgggccacacactgcgtgtgaccctccctgggcctcagtttcccttgaggcacagcctctctgatgtctggactccgggtccagtccaggacagtcctttggagagcccagtgcgtgggagacacagtccctgggctgacggtgagaaaggacaacgctgccctcatcccaatttacacgccccgaagacactggcctcaggccgctgggccaggcagtggtcagggctggggaccaaccagaaaagaagtcactattactggccgggcgcggtggctcacgcttgtaatcccagcactttgggaggccgaggcgggcggatcacgaggtcaggagatcgagaccacggtgaaaccccgtctctactaaaaatacaaaaaacattagccgggcgtggtggcgggcgcctgtagtcccagctactagggaggctgaggcaggagaatggcgtgaacccgggaggcggggcttgcagtgagccgagatggcgccactgcactccagcctgggcgacagagcgagactccgtctcaaaataaataagtaaataaataaataaataaaggtcaccactatagctcctgggcagtccaccactgctgcttctagaagattccaccattgccatttctggaagcttccatctttgtctctctgggcagctccgcattccagtcaccagggcagaaggaagaaggtgccctgaggtttttccctttggggaacaggtgggcaggctaggcagggagaggaccctccaagcacacgggagaagctggccccccctcctcggtggggcgctggggacacctcctcggggcggcacagcccgggtggggccaccaggcgtcccgcggcaggtcggtgagccggcccgggaggactggcatgctgaagacgtttgtatggattctggggcaggaggggcggcagggtcttggggggccagaggcgggagagggtgggatcgcctgcagaacctagctcaggctgctctcttcctttcccaagcctcagtttccccatccgggcaatgggggaagacgcagatagggaatagatttgcccttggcctccggggacctcgttttccggctgcggcactgcagctcagagaggtcaggctgcctgcctagggccacacagcctggaggtgggggccggccggggggcgcagacgcgcaaagcctgtccccacctcacggccccctccccgccggcccgggcggggctgctggccctttaagagcctcgttttggcgccgcctcggggttatcgatcgcagccttggaaacgcgattagattatcccggctgggaacggcagcctggcgggggccgcgcgggggaagcgcgccgcttcttgtaaacggttccccgaagggcgctgggccaggggcctgggagggggctcgttcccggtggggggggcgtcccggtgcggcgcggcccagcgctcccgggaacgggggatgggtaactggggcccccattttgtgttttgggtttggaaattgaggcgcagagaggggtgcgcctttctgcgaggccgcatacccaggaagacgggtttatttgttcagctgcatttattgagcgcctagtgtgtgccgcgcatgcgcggggcctattaatccgattagcgtttcgcataaaaatagagtcgcggatgatgatgatggtgataatgaatatccgtgctcctgactcgctcctgccgtgccaccaagcctttatgtgcgttgtctcagatcctcaccccaacacttagagtggcagaggccctggtcccattatacagatggggaaactgaggccggagctcaaacaagccagaggggccgaaccgggacaggcgggcccccggctcgctcctgggagcctccctagtagggtcaccgtagaaggaagggaagggatgggttgtggggggagttggggaccagcccctccatccactgtgaccccttctgcatccgccaaggcctctggtaggtgcctgagctgaagcagatgaacccttgagtgtgggaggaaaggatgggccagcggatgggtgggggcaggaggaggcccttccaccaccaacttctgacgcctcagcagaaaggccccgggcccatgagcttgagtcgggggctggtgggcagtggacaggaccagcttcccttccactccgcggtcgtttgctcccacatgtgaccccatgcccacggggggctggagggtgggcaagcacgcattcgttgaacacctgctgtgtgccaggccctgaaccgtccccctgccaattgtggcacagtaggagctggttccaatgcccacccacattcaccctgatgcacccccagagacccagtccagtggtcccacagtcaacgtttgttgattgaccaaatgacagtattttgcaatagcagtaaatacaaaccacttagactggacttcacttgggtctcaatgacccttcctgccccatcgtccctgaaaacctctatccttccatcgttcctaacattatggagcaccgactgtatgccccaactaccttcttcatcctctcagcagcctgtgaggcaggaaatatgactggcctagtctacagagggggaaactgaggatctggggggtggagggccttgtctgaggccgcagagcccagaagatgagattgtaaacccagacccaactgtgtctttttttttttttttctcagacagagtcttggtctgttgcccaggctggagtgcagtggcatgatctcagctctctgcaacctccatctcctgggttcaagcgattctcctgcctcagcctcctgagtagctgggactacaggcacccgcctccacacccggctagtttttgtatttttagtagagagggggggtttcaccatgttggccaggcttgtctcgaactcctgacctcaggtgatctgcccgcctcagcctcccaaagtgctgggatgacaggtgtgagccacccctcccagccaggcccatctgtgtctgaaccttaggttgtttcctaggaaaggggccggggcttgtacttctgaggctctgaatgggaggaaaccgaggcacagagctttcatgaggagacaggaggccaagactcaccctccaggttgcaggcagaaggaggggatgtggctggcttgagctacaaccacacggtaccacctgggacctcttcagtagggaccagctgggcgaggaccccgccatggtggggaggacaggagaggagggagctcaggagaggaatgtcagggaggtcacacttaggggtcgaggcaggtgattccttctgctggagagggttgccagggtgtctcagcctctgggcagggccagagcagggatggggggcccacccgtgtccccccagagtctcccctgcagccccccaatgccggacatccagaagggcgagcctgtgtctctctcctctgtctctctccttctctctctcttcatctctctttttccatctctgccactgtctccctctctatctctctctttccttctctccatctccatctctttctgtctctctccatgtctctgtctcttactctttcttaatctttgcctctttctctccatcactgtctccatctctgtctctctctgtctctattccatctctgccactgtctctccctctctccctttttgtctctctccatcttcatctctctccatctctgtctctctgtctctctctctctccctttgtgtctctctctccatcttcacctctctccatctctgtctctctgtctctctctctctccctttgtgtctctctctccatcttcacctctctccatctctgtctctctgtgtctctctcttccatctctgccactgtctctgtctccctctccctttgtgtctctctctttccatcttttctgtctccctatctccatgtctctgtctcttactctttcttcatctctatctcttcgaccctctctcctcgtcccccagtccctctctctgtctctgtctctctctttgtctctccatctctctccatgctcctatctctgtctctggccctctcctccccctgactccggagccacatctctccccttcccagctccctggccccctccccacccgcctcaggagccctcagctgtggtctctccaagtgcccccactcctgccgggaagggcctcatggggccctggtgggccttggtgctggacaggtagagacttgagaagctcctgggtgccccagctccaccctgtcccctgacccgagcaggccgcatggccttggccagccgctgccctctctgagccctgccctgcccttgaaatctgggagggtcggtgtctggcttggtccccccagcctaggacttcataaaagcccagcacccatcgaaggtggacaccctagagctgggagaagagaataaatgagccaaccaggaccagcccctcaggcctcacctcacttctgccagatccccgcagagaccccccatcttctggggaaactgaggcacaggcagggtacaggtgccggaggagggctaaaggcggctaaaggctcccgcgcccgggcgtccctctcgttgtctgcagggtgtggagatgcctcaggccaggggctggggctgggaccacctcccccatggcatccccccaggtgctcccatgctggttcctggccctctttccagccttgatgaaggcaggcgcaggaaggggctcggcctgcacgtccctgccaggagcatcgtcatgagcgtgaagggggcaggcgcctggtcagggtcacttcccgctggacagatggggaaactgaggccggggtctgtaggaggctttggtcctatccactcctcaacgcacttccctaaagccaactccatgcccgacccagcagtgatccggccaggtcctgtcctgccctcccaggcttcagggcaaagaaggaggttcattctggccaggcgtggtggctcatgcctgtaatcccagcactttgggaggccgaggtgggcggatcatgaggtcacgagatcgagactatcctggctaatacggtgaaaccccatctctactgaaaatacaaaaaattagccgggcgtggtggcgggtgcctgtagtcccagctactcaggaggctgaggcagaatggtgtgaacccaggaggtggagcttgcagtgagccgagatcatgccagtgcaccccaaaaaaaaaggaggtgcattcaacaaaaggacccctaaatacagcagtatagcccagggtggggccggcaggcagagaagcgaccccccggggcagctgccaagggcccaacacgggctggggtcagggagggcttcctggaggaggggacacttgagctgtggcctgaggtgagcaggagctcagagagtagacagcacttctggtacaggaaggaggaggacagcgccctgaggccggaaccaggctgtggggaagcaagaccggacactggagctggaggctgggccatgcagggtcccgtgggctgcgttgaggacgtgggtctttttctggggtgcactgggagccacaggaggctgttgtgaacagagtcatgtttccttgtttctttttcccttcttttttttttttttagagataggattttgcaaattagccgggcatggtggcgcgtgcctgtaagcccagctactaaggaggctgaggcaggagaatcacttcaacctgggaagtggaggttgcagtgagccgagatcacgccgttgcactccagcctgggcaacagagaaagactcagtctaaaaaaaatttaaaaaaaaaaaaaaaaaagagagagagagatggggtcttcctatgttgcccagactggtcttgaactcctggactcaagtgatcctcccgtcttggcctcccaaagctctgggcactcttgtcacccaggctggagtgcaatggtgcagccttggctcactacatcctctgcctcccaggttcaagcagttctcctgcctcagcctcttgagtagctaggattacaggcatgcgccaccacgcctggctaatttttgtatctttagtagagatgggggtttcaccatgttggtcaggctggtctcgaactcctgacctcaggtgatcctcctgcctcagcctcccaaagtgctgggagtacaggcgtgagccaccgcacccgggcctaaagtcatgttttttaagccaccagccctggtggcttccagggaagggctgttggaggcagatggggaggctggaaggctgggttgaggctgagtcaagtccacgcagatggtctctgccaggcgactgtgtcagagatggagagacagggagagacaggcaaggtttgccttcctgcccagcttctgtgacccagggggcagctggacggctgggcaggggtctggggaccaaggggtgcagggcagtggccgtggccctgccggcccctccacagcagtaattaagggctcccggcgtccccgcggcgtgatgtatgtgtaccttaactaatcatttattaggtcactgatggttcgtcaatattaattcatttatttaaacaactcagctctgtaatgaagatgttgtctgagaggggaggctagttggtggcggggccaggatgcagaaagggggctcagatttgggtcttagggtggcctcaagaaatgtcagctgggcacggtggcacatgcctgtaatcccagcactttgggaggttgaggcgggaggaggacttgagcctaggagtttgagaacagtctgtgcaacattgagaccacatctctacaaaaaaaaaaaaagaaaaatttaaatacaggccaggcgcagtggcttactcctataatcccagcactttgggaggccgaggcgtgtggatcacatgaagccaggagttcaagaccagcctggtcaacatggtgaaaccccatctctactaaaaatacaaaaattagccaggtgtggttggcgtgcacctgtaatcccagctactcgggaggcggaggcaggagaatcacttgaacccaggaggcggaggttgcagcgagctgagatcacaccactgcactccagcctgggtgatagagcgagactctgtctcaaaaattaaaaaaaatatataaaataaattaaaaatacaaaaattttttttagctgggtgtggtagtgtgtgcctgtagtcccagctactggggaggctgagatggaaggatcacttgagcgtggaggttgaggctgcagtgagctatgattgcaccactgcactccagcctgggccacacagcaagaccctgtatcaaaaaaaaaaaaaaaggaatcatgcctgtaatcccagcactttgggaggccgaggtgggtagatcacctgaggttaggagctcgagaccagcctggccaacatggcgaaaccccatctctactaaaaatacaaaaaattagctgggcagggtggtgggctacttgggaggctgaggcaggagaattgcttgaaccagggaggcggaggttgcagtgagctgagatcgtgccactgcactccagcctgggcaacagagtgggactctgtctaaaaaataaaataaaataaaataaaataaaataataattaaataatcagatgacacccctaccctgctcaagaatagtccatggctccccagtgccctgaggagaaaacccacactcatccgaccctgggtgacctttgcggctccgtcttcactcactctccactcactgtctccctttgcccattgctactgctggaaacttcccagctccttcccgccacatggactctgcccttgctgtgccctcgcctgggagccgccgtcccgcatctcctcccggctccttcactccctggggtctcagcgtcagtgtcatctcccagaagcaccttctccaatctccccagtcccagggcccccagcacctccccgtcacccatgatcctgtttgatttccctccgagatcttcttggtgatgtacgggtttagctgtttatcgtctgtttttcctccatcttcaccttggtctgtcccagagagtagatggcactcagctgctgctgcccctccacagcagacatttctggggccccgtattttggctccttggcccccgttgctggttccctgcaggcgctgggtgcctcctccgggtctccgggttttttgtttcgtgtttgttttgagacggagtctcgctctgtcacccaggctggagtgcagtggcgcgatcttggctcactgtaagctccgcctcccgggttcacaccattctcctgcctcagcctcctgagtagctgggattacaggcacctgccaccactcctggctacttttttgtattttttggtacagacggggtttcaccgtgttagccaggatggtctcgatctcctgatctcgtgatccacccgcctcggcctcccaaagtgccgggattacaggcgtgagccacctatttattacatttttaatagagatggggttccaccatgttggccaggccggtctcgagctcctgacctcaggtgatctgcctgccttggcctcccgaagtgctgggagccaccacacctggccactgccaattttatagatgaggaaacagaggggcagcagttagcaggcttgcccagcaggcactaataataataataataataataataataataataataataataggcagggtgcggtggctcacgcctgtaatcccagcacttgaggtcaggagtttgagaccagcctggtcaacatggtgaaaccccgtctctactaaaacacaaaaattagccaggagggatggtgcacacctgtaatcccagctactcgggaggctgaggcaggagaatcacttgaacccgggaggcagaggttgcagtgagctgagatcacaccactgcactccagcctgggcaacagagtgagactctgtctcaataataataataatagtagtaatattaataataaggctgggtgtggtggctcgcacttgtaatcccagcagtttggggggctgaggaaggaggatcgcttgagcccaggagttcgagaccagcctggacaacacagggaaaccccttgtctctacaaacaatacaacaaattagccgggcatgcatctgaactcccagctactctgaggcggaaggatcgcctgaacctgggagattgagggtgcagtgagctaagattgcaccactgcactccagcctgggccaccagagtgagaccctgtctcaaaataataacgataatggtaaaaacccttactacacggctgtcatgcgaactgtgtcagctgttcgttcattcattcattcattcattcactcggacacccaggtgtctgaatctctttgtgctcagaccccaccctggaggatttggagcctgagtgggtgcatcccgggcatggtctggacagagctggacaccggcattcccggctctgtgcagtcagggtgggatcagagggagagacctgagattggggaataggggcagaggggctgagggctgggcctgggggggatgggagggctgcagggagtggggcttggaggatgagtgggggacatcggctaagggaagcaggaagggacccctggcagagaccggcacgtgcaaaggctcggagatgtgaaggggcagccctagagactcctccgggctggagtgcagcggtgccgtctcagctcactgcagcctccacctcccggactcagcctcccgagtagctggaactacaggtgccaccatagcagggcaatatcttaacttttttgtggagatggggtctcaccatgttgcccaggctggacttgagctcctggcctcaagtgatagtcccgcctcggtctcccaaagttccagttagggattctgatctggggagggcactggggagccacgcagggtctcaagcagggggagggatgtgtcccaactggccttcaagagtgatcgctgcactctgagtacaagtgggagcattcgaagttccattagcaagctccggtttggcaagcatggattgagcacctactgtgtgcccgtctttggcctcagccttagaggccagatcacacgaaggcttgtgggcacgcagttgggggccagccccacaggcgagtccaggctttcaaatcaggaatccccctgccctgtctgcactggtggaaactgctgaagccgtcaggagctgggagccggctcttggtggcttgatagtgtgcgatgggccagtgtaggctccatcccaggctggacaccggtcagtccccagaggaagtatcgccgagtctgggggtggccctggcgcacgtgcagaacctctcagccactctgatggtgcttaaggcaggcggtcagggtattcaagttaacttcctcttaaacagacttaattagtgttctccagtcccacataaattaatcgtggccggccacggaggctgaaacacccgatcgatggggtggctcggcgacggccaggaattctccgtctcatccgtcaccacagcaccggctgataacggctcacggctttatcttctccaacctggcatgaccagccgggggaaggcggccagaggggtctgggggggtgctggctgctctctgagcctcagtttccacttctacaggatgggatcgtgctcccacaatagcagattggcaaaggggctggaaaacagctaataataacaacttggccaggcgcagtggctcacacctgtaattccagcactatgggaggctgaagtgggagaatctcttgagcccaggagttggagaccagcctgggcaacagagcaaaacctgttgcacaaaaaaataaaaaaaatattggccggacgtggtggctcacacctgtaatcccagcactttgggaggccgaggcaggcggatcacaaggtcaggagtttgagaccagactgaccaacatggtgaaaccctgtctctactaaaaatacaaaaattagccgggtgtggtggtgcatgcctgtaatctcagctactcaggaggctgaggcaggagaatcgcttgaaccagggaggcagaggttgcagtgaaccaagatcacgccattgcacttcaacctgggtgacagagtgagactccatctaaaagtaaataaataaataaaaaccaaaaaatatttacccaaacatggtggtacgtgcctgtagtcccagctacccaggagtctaaggtgggaagatcacttgaggccaggagtttgagaccagcctggacaacatagcaagaccccacctctacaaaaaaattaaaaaataattagcagaatttggtggtgcatgcctgtagtcccagctactctggaggctgaggttggaggactgcttgagcccaggagatagtgactgcagtgagccgtgatcgcaccactgcactacagcctgggcgacagagtgagactgtctctcaaaaacaaaacaaacaaacaagaaaaatagtgtaacaaccaccgcatagggtcatgtggctgaccccagtgctaagcatcatctaatttattttaactaattaattaatgatttatttatttgagacgagtttcactgttgttgcccaggctggagtgcaatggagccatctcagcttagaacaacctccgcctcccgggttcaagcaatgctcctgcctcaacctcctgagtagctgcaactacaggcatgagccaccacgcccagctaatttttatattttttggtagagacgaggtttcaccatgttgtccaggctggtctccaactcttggccttaagtgatccgtccacctcggcctcccagagtgctgggattccaggcgggagccaccgcgcctggccagtatcatttcctttaatccccacaagaggcctgcagggccctccattcttctctccttttccagcgttgagtgacccctgtgaggtcccaccaccggcaaatggctttgtctggatttgaatccagtgaggagccccagaacctcagcctcaagggtctgggattttgtggataagggctgcagtggtagagactgcatagctgctatatctcacccggcacgcaggagcggctgaggccaccctagaaggctctgcaccccagtcttcaggcatccatggatttgaaggcggggctaggggggattccaggaggtgccgggtgcaggcagttcacgggggacccctccggatgagcccagccaggctgatgttcgtgcccctggggtctggaggtcctccctccgagtgggaccgaaacctacattcgagactgtctatacaaaggtattgcgaatccctgctgcacaccaacccctgggctgggggcttcgggggctgtgggcacggtcgtcatcacagtggacatgacctcttttcatggaagagaaaaaccaatgaatgtccaatgagaaaaccacggagggggccgggcgcggtggctcatgcctgtaatcccagcactttggaaggccgaggtgggtggatcacctgaggtcaggaattcgagaccagcctgcccaacatttttggtagagtagtaccctgtctctactaaaatacaaaaaattagccgggcgtggtcatgggcgccagtaatcccagctacttgggaggctgaggcaggagaatcgcttgaacctgggaggcagaggttgcagtgagccgagatcgcaccactgcactccagcctgggtgacaagagcaaaacttcgtcacacacacacacacacacacacacacacacacacacacacacacaagaaaaccacggaggggtcagagagggcttcctggaggagggggcgtaagacctggaggaagaagggccaagagggaggggtggccaagggcctatcattgtccccaagaggagaagaagagtggggttgctatgaagcagttctagaaaacctatgatcagggattatgcctgtaatcctagcactttgtgaggccgaggtgggtggatcacctgaagtcaggagttcgagaccagcctggccaacatggtgaaaccccgtctctactaaaaatacaaaaattagccgggcgtggtggcgggcgcctgtaatcccaactacttgggaggctgaggcaggagaatcgcttgaacccgggaggctgaggttgcagtgagctgagattgtgccacggcactccagcatgggcgacagagccagactctgtctcaaaaaacacaaacaaaacaagagaaaacatgtgatcagaaaagcccccaaacctggagccactccggagctgggggagccgaatgggtgggatggatagggcgtggccgcatcggagggcgactgacgagggggcggggccaagtgagtgaggcttttgtggaggggcggggccaaacgcgctaactgcatgtggacgtcgtctataggggccggctttcccagggggcgtggcctgcgtgcgacagggccaaggtggggcccaggcaggttctcccctctttgaggaccaggcctaaagcagcaaagacccatccacccaaggagttgttgagaccccgtagacctttgctaggtgtggatgacctccagccctgtgggaccagaatggggtgggagagggagacccggagctgaggaggacccggagggtacctcggaagctctgcctgggatcggggagggctcctgaaggaggcggctttgaggatacagaggacagccagctgacaagacagagagggtgcatgtgcaaaggccttgagacaccagcagagtaaaagccagtttgcctggagcagggtgcatggtgcgtggaagagcctgggagaccaggtggagacggggacagggcggggatttgtgctttccggagaagtggagaagccatgggggcttctggcaggtggagatgggcaacgatgcagttcgtataaaaatataaaaattagggcagggtgcggtggctcacacctataattccgcactttgggaggccgaggcaggtggatcgcctgaggtcaggggtttgagaccagcctggccaacatggtgaaactccagactttgaaaagtcccttctggccgggcgcggtggctcacgcctgtaatctcagtactttgggaggctgaggcaggtggatcaactgaggtcaggggtttgagacccacctggccaacatggtgaaaccctgtctctactaaaaatacaaaaaattagccaggcgaggtggcaggtgcctgtaatcccagctactcgggagggtgaggcaggagaatcgcttgaagccgggaggcagatgttgcagtgagccgagatcacgccattgcactccagcctgggcgacagagccagactctgtctcaaaaaaaaaaaaaaaagtcatttcttggactacctggagggcaggaggggagacaaaaggaggtctgggagcaacgtccaggctgggggcaaggggtgctgaggactgcggagggctgcagaggtggggagaagtcgctagattagaaacagatttttttttttttttgagacagggtctcactctgtctcccaggctggagtgcagtggctcaaacacagctcactgtgccagcctcggcctcctgggcccaagtgatcctcccacctcagcctccagaggagctgggaccacaggtgcacaccgccaggtctgatttttttttttttttttaaggcagagcctcattctgtcacccaagctggagtgcgatggcgcgatctcggctcactgcaacctctgcctcccgggttcaagcgattctcctgcctcagcctcctgagtagttgggattacaggcatgcaccaccatgcccggctattttttttttttttagacggagtctggctctgtcaccaggctggagtgcaatggcatgatctcggctaactgcgacctctgtctccagggttcaagcgattctcctgcctcagcctcccaagtagctgggactacaggcatatgccaccatgcccagctaattttttgtatctttagtagagacggggtttcaccatgttggccaggctggtcttgaactcctgaccttgtgatccacctgcctcagcctcccaaagtgttggtactacatggtgagccaccatgcccagcctaatttttgtatttttagtagagtagagactgggtttctttttttttttttttttttgagacaaagtctcactctgtcgcccaggctgaaatgcagtggcgcgatctcggctcactacaagctccacctcccaggttcacgccattctcctgtctcagcctccggagtagctgggactacaggcgcccaccatcacgcccggctaatttttttttatatttttagtaagacggggtttcaccgtgttagccaggatggtctcgatctcctgacctcgtgatccgcccgcctcggcctcccaaagtgctgggattacaggcgtgagccaccgcgcccggcgagactgggtttcaccatgtttgccaggatggtctcgaacttctgacctcatgatcagcccgactcggtctcctaaagtgttgggattacaggtgtgagccaccgcgcccggcctgattttttattttttgttagagacgggggtctctctgtgttgctcaggctgatctcaaccccctggcctcaagcgatcctcccacctcagcctcccaacgtgctgggattacaggcgtgagccactgcgcccgacagacagttggcatttctttctggagccgcctggtaggaaggaggaggttggcagtttgaggacaattttgcatgagtttggaaattggtggtctgggggaggctgaggccggattccctgtaagccttctagaggcagccggacccgagttcagaccctctgtgggccttgggcaagctgcttggcttctcagagcctcagtttccccatctgtgagacaggtgatttgcagcgagggtgaaatgaggtggagttccaaagcagcaagtcagaggctgggtggcaagaacgaaatatactccgtgtcaaaggaaccactgctgcagtccacacccccgccctgctagaccctcagctcctgcagggagaggccggctgactgcgttctgtgtcgcttctccagagcctggatgtggaagggagggagggaggtcgcaaatgtccccttccctctaggggacctggcgtcacgccccatgagaaagccggccacagcaggccacgcccaaacacaggccacgcccacacaaggcagcgcccctccaccaaagccacgcccacctgccccgcccctcgtcagttgcctccacatgaggccacgccgcacccactcggttcccctctctgaactcatgggaatgacccaagcaggtcttgtctttgcgcctcagtttctccaacacggaagtggccacagctgatttccgtgcctctgtctgagctgggaaacgaccctcaccggcttggaggaagccttggtccccagcccggcccccatctccgcgccggcttgcactccccagggacggggagctcaccccctcccagagccctggagtggaggtttgatgcctgtcaggctggggcccggggatgggtctgggggaggcacttctgagaaaaggtggaaacggttctcagaaaccccgaaaccctgagggactcttttccttctcagaaatgctccccccgccccagactcgggaaaacgcctgttcgagaaagctgggctggctgtgggcaagaggcttggaccggcccctgtggagcccctgctccaggctgctgggaatgtcccccttctccagctgtgacctccaccccaggcaagtgtttcctgccacctgcctgtccccaaggggtccccatgttccccgcctgctgccgtccacctgccgtgtcctctgtccctccccacacggggcagggggccactgtgacctgaagcccgtcctccccaccagcttggccatgctagacacaggggcctccccagagtgtatcctccccaaaacagcccaggaacacaccacaccccacccccgaatttgcagccctggggcgggctgtggactcaccagctgatggcggcccctgacggtggtctcagccagggccctgccgggaagagagagactcatcctcagtcaggtgttaatccacctgtgcccctcacttgtcccaggtgcccatgagaaggaagggggccgtgggcagctgatggccaaaatgcaggggagccccagtgtcagggagggacacagcacctgccccgaaaatccaggcagtccttccggaaggagccggagcctctgtgtgtggagacgggtgggaggtccccagcctggcgcccggctgcccctgtgcctagggtgtcctagttcagaggtccccactgtccccgctttggggtctcccatagggtaacccccccatgaaggccctgcaaccctctcccctcccctggtgtgtcccccctccttctgaaatcactaatgggttacctcctctagcctccaaatttcccagcctccaaattgattcttccaatatagcatcctgacagggcgcggtggctcacgcctgtaatcccagcactttgggaggcagaggcgggcggatcatctgaagtcaggagtttgagactagcctggcaaatatgctgaaaccccatctctgctaaaaatacaaaattttgagacgggggtctcactctgtcgcccacgctggagtgcaatggcacgatctcggctcactgcaacctccgcgtcccgggttcaagagattctcctgcctcagcctcctaagtagctgagattacaggcatgtgccaccatacccggctaatttggcatttttagcagagatggggtttcagcatgttttccaggcttgtctcaaacttctgaattcagacgatccgcccacctcggtctccaaagtgctggtattacaggtgtgagccactgcacctggtcagaatgccttattggaagaatcaatcttctttctttctttctttctttctttctttctttctttctttctttctttctttctttctttcttttttttttgggttggagtctcgctcttgtcgcccaggctggagtgcagtggcacgatctcagctcactgcaacttctgcctcccaggttcaagcaattctcctggctcggcctcctgagtagctgggattacaggcacccactgtcacaccctactaatttttgtatttttagtagagatggggtttcaccgcgttggccaggctggtctggaactcctgacctcaaatgatcctctcgccttggacttccaaagtgctgggataacaggcgtgagccaccgcgcccggcaagaagaatcaattttcagaatgtgggtgtgtcagacagatgcaagcagagtcctgtcctccaggtgggggtgcaggctgggtgcctgccctgcagctgctgtaataaatgacctcaaatttattggctcgaaacttcacagatttatgctttcatggttcaggagataagaaatcctaaaatcaaggcatgggcagggctggtccctcctggaggctccaggggagaacccatttcctgcctttcccagggtctagaggcgtccgcatccctcatcttagggccctttctcccccttcacagccacagtgctgccttttccagtctctctctgactccccaggctggggtgcagtggcaccatctcagctcactgcaacctctgcctcccaggttcaagcgattctcctggctcagcctcctgagtagctgggattacaggcacctgccaccacgcccagctaattttgtatttttagtagagacggggttacaccatgttggccaggctggtctcgaactcctgacctcaagtgatccacccaccttggcttcccaaagtgctgggatcacaagcatgagccactgctcctggccctcccgccgcctcttaaaagaaccctgtgaggacattgggcatcccccagataatccagtatgatctcctatccaaggtccttcatttagtcccatctgcagagtccctttagggatgtaaagtgacctatccataggtttcagggattaggattcgggggtgcacatctgtggggggccactattcagctcgcccagaggacacttccctacacaactcccccattcctgaccctaccttggagctgggagatgttcacagcctctgaggctgccaggaacactgcaaacccccagagattagatgatctccaacatattccaacgatttacttggcaagcatttgttaagtgcctgctgtctaccaggcccatctggctggtccggcttcatggatgtgtagcccagtggttcagggtttcatgtttggcttaatgctctggtgtctgtcaccatcttgatgcttttgctaatttgatctttgaacttgtgtgtgtgtgtgtgtgtgtgtgtgtgtgtgtgtgtgtttgtttgtttttaatgcagtctcgctctgtcacccaggctggagtgcagtggtgtgatctcagcttactgtaatctttgcctcccaggttcaagtgattcttctgcctcagcctcctaagtagctgggattacaggtgtgagccaccacacccggctaatttttttgtatttttagtagagatggggtttcaccacattggccaggctggcctcaaactcctgacctcgtgatctacccaccttggccacgcccagcctgaacttgtgttttataagtgaagtccagtggaacagtggagcgagcctgtgagcaagggaggtcctgaaaacgtgtgtgcttagctattccatgttggtctgtttgcacctagtggtcactatgcccaggggcacagagatccaggatcccacagctcatgagagttcagcgagacccaaaacgagtaccaggtgagtgtgtgagagagttggtagaataggcgtgcacgaagaggtaaaataaaggctgggcatggtggctcatacctgtaatcccagcgctttgggaggccaaggtgggaggattgcttgagcccaggagctcaagactagcctggaaaacatagcaagaccccatctctaaaaaacaaaaaaatgaacaaacaataagccgagcatggtggtacatgcctccagtcccagctactctgaaggctgatgctggagggttgcttgagcccaggaggttgaggtggcagtgagctgtgattgcaccactgcattcccaccttggcaacagagtgagatcccatctccaaaaaaaagaaaagaaaaggaaagaaaaagtgaaataaaaacaggttaattgtgttcagtgtttcagttgttcccatcagaaccaaacacatatgctcatgcaatctccaaaacacaaatggcctaatttaggtgattctgtagacaagtcacatgttcttaaagaaccatagccaatatttccagaccaaatgatgaaattctttcaatagttgtatttaaacctggcattacatagcataaagatgaatggtcaaattcacaataataaattaaattttaaaaattttaggcttaaaaaaatttaaaagttttttaaaatttaaaaattaaaaaaattttaggtggttcacgcctttgggatcccagcactttgggaattcgaggtgagaggatcatgcgagcccaggagtttgagaccttcctggctaacacagtgagaccccatctctacaaaacaatgaaaacatcagtcaagtgtggtggatatggcttggctgtgtccccacccaaatctcatcttgcattgtagctcccacaattcccacgtgtcgtgggaggaaccctgtgggaggtgattgaattatgggggcgggtcttttctgcgctgttctcgtgatagtaaatgagtctcgcgagatctgatggtttaaaaacgggcgtttccctgcacaagctctctctgcctgctgccatccatgtaaggcatgacttgctcctccttgccttccaccatgattgtgaggcctcctcagacgtgtggaagtgtgagtccattaaacctcttttttttttcttttcttttcttttattgaggtggagtctcgctctgtcacccaggctgcagtgcagtggcgtaatcttggcttactgtaacctctacctcctgggttcacaccattctcctgcctcagcctcctgagtagctgggactacaggtgcacaccaccaggcccagctaattttttgtatttttagtagagatggggtttcaccatgttagccaggatagcctcgatctcctgacttcatgatcttcccacctcagcctcccaaagtgctgggattacaggcgtgagccactgtgcccagaccattaaacctctttttcttcccagtctcaggtacgtctttatcagcagcatgaaaacaggctaatacagtggtggtgcatgcctgtggtgccagctacttgggaggctgagatgggaggatcacttgagcccaggaagtcaaggcctcagcaagctgtgattgcaccactgcactccagcctgggcgaaagtgagactctgtctaaaaaatatgtaaaataaactgtagaatgatgtggaatagcaaattgaagaaaactatgacaagttgagagagactgtagaagaaagaaaaaagctttaatgttagcactttgaatgatacttttttcttacttttttttttctttctttttctgagacagtctcactctgtcactcaggctggagtgcagtggtgcgatctcagctcgctgcaacctctgcctcccgggttcaagtgattctcctgcctcagcctcccaagtagctgggactacaggtgcgtgcaaccatgcccggctaatttttgtaattttagtagagatgaagtttcaccacgttagtcaggctggatggtcttgaactcctaacctggggtgatctaccagccttggcctcccaaagtacaggcatgagccacagcacctggccagtctgtctttataaataaagctttattgacacacagccacagccactcacttatatattgtctgtggtggttttactgccactgcagagctgagcagtcctgacagagactgtccaattcaaaaagccaaaaacattggctacctggtcccttatagaaagtttgcagagggccgggcgtggtggctgacgcctgtcatcccagcactttgggaggccaaggtgcgcggatcacgaggtcaggagatcgagaccatcctggctaacatggtgaaaccccgtctctactaaaaatacaaaaaattagccgggcgaggtggcgggtgcctgtagtctcagctactcgggaggctgaggcaggagaatggcgtgaacccgggaggcggagctcgcagtgagctgagatcgcgccactgcactccagcctgggtgagagagtgagactccatctcaaaaaaaaaaaaaaaaaaagaaagaaagaaagaaagtttgcagagcctggtctcgagggtggagtccagaggtgaggctgggagaaggtgagggctgctggaacatggcagagcgggcgtattccagggagacttgggtgagactcgaggatgctggagaaggtaaccatcggggtggggtgcgaaggagggcagcaactctcctgggagatgggatggatggtggggccgtgggtgagatggggtcatgcagagaggacagaccaaggccccagtggaccctgggggaccctgtggctgtcttcagagcagcccccgaggtatcagtgctcacagcaacttgcggatacagcctagaaggccccatgcctcaaaaattcttagagtctgaggagctcaagaggctcacatcagcttcgggaagctctgtagggcggccaccaagctggactgagggatgggcggaagcagctaaggcctaaattggtggaggttggccggacacagtggctcatgcctgtaatcccagcactttgggaggccgaggcgaggattgcttgaactcaggagttcgagatcagcctgggcaacatagtgagaccaccccccacccccgccaacttatacaaaaatttcaaaaattcaggccggcacggtgctcatgccggtaatcccagcactttgggaggttgaggttggtggatcacctgaggtcaggagttcaagaccagcctgaccaacatggtaaaaccttgtctctactaaagatacaaaattagctgggcctgatagctcatgcctgtaatctcagctgcttgggaggctgaagcaagagaatcgcttccacccagcagatggaggttgcagtgagccgagatcgtgtcattgcactccagcctgggcaacaagagtgaaactccgtctcaaaaaacaaaacaaagcaaacaaaaaaattcaaaaattagccgagtgtggtgatgcacacctgtagtcccaactactttggaggctgaggtgggaggatcgtttgagtccaggaggttgaggctgcagtcagctatgattgcgccaccgcactccagcctgggtgacagagcgagaccctgtctcaagaaataagaagagaaggaagttggtggaggacattccacgccaaggagcccatgagccccggctggtggtgcacgtggagcatttgaagtcaccaccagtgacccggcccaggtgcctctgcagtgggacgggaggccggctttggtccagctcagacagagcttcagatgcccatcaagggatggggggctttgttgggaaccccatggtgccccctgggcctgcacatgtcgccccagtcccaaatatgctcccacctctggggccaggccactgaacgcccttcaggacactgtccaggggccagagtcaccatctgctgacccggcacccaaatcttccgcctcagaccctcctggccctccggttctccctctggctggccctcagccctccctggcacggaccacgtcttccgaggatgccccggaagatgcaccgtggataaggccatgcgatcaataggtccatcggccgccgggggggcggaagcgcggctcatcagggcgcctgctgtcccctccccaccctccaggaaggcggataaggcccggggaccctcttaagggacgcctggcacccgcccgccgcccggcactcctatctcccatggaaggacccagttcctgaattgccccatgggccgcgccgcaggcctgcaccgaagctcttaatagcctgggcctaatgttttattgttggttttaaaagtgtaattagttcaagtgtaaacagaaaaaacctgcttaattaagaatttttaaacaggggcataaagcgggagcgggagcattgacgaaccccaagctgcttcataacatcgatcggaagaggctccgagtggagggccgggcggggcgggcgccgcgggggcctgggagcctcccctggatgccatttgccgcccgggtgagggccccggggacctgctggtttacgatcggggtctcgggaccggtgcctaatgatttttatgcattaatggagatgacagttggccaagcaggctgtttaagaagcctttatggggggctgggagcccagtcctgtgaccctgggctgtctcgggggtgagaacccccgctgggagggaggccctggcgctcccaccctcctggggccggcttgctgggcggggtccgggtgttgccccctctccaagtggcacccaccgagggagtctcagcatcaccgtgtcacctcccggccgatccggcctgtctcggagtcaggacttgaatttccttcgaactgcaaggggctctgccttctacagagccggggcggggcggccctgacagtggggctgggggcgtgggctgtgccatgtgcctggcatggggcctcatgccggaatgaaccagagcccagggtatgctcagcctggccccggccgctggggaggggagggtggggccctgacccttcaccaggaggtggggaagaccccaggcggggcttaggggcaccctgggtttggagatttggctgctctaaacgtagagagcctggtggcccttggcacccatgaccctggagagcaaggcctgggggtcttggggggccacaggcgagcccaggcaggggctctgctccagcctcagtgccctggtctgtggcaggtctgggggttcctgcccttgtgagcccccaaggatgcatacacggaggggggctcagaaggcaccagcacgtggaagctggtggggtcctgctctccgcctgagcctcacagagccggggggttgctggtcccggtcacttcccacccccataccgacccctatgtggagatgggggacaggagctggcctggactttggtccttgccttccaggaggagcccaggctctggagttactgtgaccgcctcccttgtggccgagacgcggccccatttgacaggcgtggccaccaaggctggcccaggccccatggggacccaggtgtcggatccgactgtgcccggcttcaaggctccagcctggacctggcagggagccagagagggcccaggcttgaggccccagatggatgctctgtttccagaacaaagaggtgtcaagacccactgtgtgctgggggtcccacccccggccctggaacctggggcaggaaggatactccatgcacacctttcagggggtcagaggctgagacggtgcctggggcagacccgtgggttggggtgggggtgcccagatcttgacccccatccgtattcccaaggggcagagatgggacgtgactcctcctggcccccgccgccggcccgcaggtgttggggtctctgggctgggtctcccggcgttgtggctgctgccgagggagatgaggccaccctgatccccgcctgctccagccgcagcaaccaaggacgatcgatagccgaggcggccgctggggcttctctcctcttgctgtggggtgggggctgggtgcggggcagccagaactggggccagaggtgcagacgggcgggagcatctgcagcccaccggtgtccctggctcctgcgcgctctccgtctctctctatctctccgtgtctctctatgtctctgtgggtctctgtctctccctcttagtttccatttcttctgcctctgtctctgtgtctttttgtctctctgtctctctgtttctgcctctctctgattgtgtctcttcctatctctctatctctgtctttgactctctgtctctctctgcctctatctctgtttctgtctctctgtgtctctctctgtctctatctcttctctatttcactctctgcctctctctgtctgtgtctctgtctttttctgtctctttctctgtctctctgtgtctctctctgcctctatctttctctctgtctctgtgtctgtctctgtctctctgtctctgcctctctctctctctgtctctatctcattctctgtctctctgtctccctctctcctcctccctctctctctttgctcccccctctccatcacagaacccaaagcaggacctgagatctcccccagaaggtgccctggggagcccccatcacagctgaggacgggcagactcaggatcacccccgtggctcctggcccccgcccggccctggccgagtctcctgtccacccagcctttgttcaagtttgaaccttccccacacatcagaggcttcagatttccccggagaatccgatttgggccactccgacgctgcagctgcgtctgtattccgggcgggtcccggccccacagacttcccgccatggcccacttcctggcacgggttggttggcccctcaccggctgtgaggtggggtccctcgccagtgggcagatgaaagcagtctcccctcctttccccagccccccggccggaatccacagcctcaggtggtggaaagagcactgtgcggggggagtcacaccctcccaggttggagtgtccctcacagtgggaccctggagcctcagggctctcgtctgcaaagtgggggtgagtttgaggaaacaacaccatttcctggagacaggcaagggccccttaacggccaagacacttgcagtacaagaactaggaaactgggctgggcacggtcgctcacacctgtcatcccggcgctttgggaggcctaggtgggtggatcacctgaggtcaggagttcgagaccagtctgttcaagaccaacctggccaacacggtgaaaccccgtctctactaaaaatacaaaaattagctgggcgtggtggtgtgcacctgtaattccagctactcagaaggctgaggcaggagaatcgcttgaacccgggagatggaggttgcagtgagccgagaccacaccactgcaccccagcctgggcaacacagcgagactccatctcaaaaaaaaaaaaaaaacagaaaacaaacaaaataactaggaaactgtacttaaatggcaagaacaattgagtgaaggtggggtggaaattcaaatccagctgcagtatcagtattttccaaaatgtctacaattttcacttgttaccttgggcgaggcacagtggctcttgtctataaacccagctactcaggaggttgaagcgggaggatcgcttgagcctggaggttgaggctgcagtgagctgagatcacaccaccgcattccagtctgggcgacagacggaaaccctgtatctaaagagaagagaagagaagagaagagaagagaagagaagagaagagaagagaagagaagagaagaagaggaagagaagagaagagaagagaagagaagagaagagaagagaagagaagagaagagaagagaagagaaaagagaagagaagagaagaagacaccacaggccaggcgcagtggctcatgcgtataatcacagcgctttgggaggccaaggtgggagaattgcttgagctcaggagttcgagaccaccctggccaacgtagcaaggccccatctccagaagttttgttttgtttttttttttttttttgagacggagtctcattctgttcgcccaggctggagtgcagtggcatgatctcggctcattgcaacctctgcctcccgggttcaagcgattctcctgcctcagcctcccgagtagatgggattaaaggcgctcgccaccatgcccagctaatttttgtatttttgtagagacggggtttcaccatattggccaggctggtctcgaactcctgacctcggcctcccaaagtgctgggattacaggcatgagccactgcacctggccgaaaattttttttagaaaagaaaaggcgcaacaatgagcatccttggacatgaatctcttacactctctgaagtttttcttcaggacaaattcatcctggagttgcttgtcaagagaccataaaacaaatagtaaggcttttgatacattttatcaaattatctctgaaacttcataaaatacatatccttccattgtacatcagcctgttcatttactctcatccatgccaataatgggagttgttatatatatataatatataatattatgtatatcacatattatatatagtatatataatataattatatataataaatatattaaaaattatatagtttatataattatataatatataaatatatatttcatatataaatatatgtatttatatataaatgtatatttcatatataaatatatgtatttatatataaatgtatatttcatatataaatatatgtatttatatatataaatacatatatttaaatatatatatttttagacggagtcttgctctgtcgcccaggctggagtgcagtggtgtgatctcagctcactgcaagctgcgcctcccaggttcatgccattctcctgcctcagcctcccgagtagctgggactacaggcgcccgccaccatgcctggctaattttttgtatttttaatagagacggggtttcaccgtgttagccaggatggtctcaatctcctgacctcgtgatccactcgcctcggccttccgcccacctcagtctctcaaagtgctgggattacaggcatgagccaccgtgcccagccccaggagttgttatattttaaaaatcaaggtatatcatctagcaagtctacttctagatctgtgtccaaaatagttgaaaagaggtgtttaaacaaatacatggctgggcacggtggctcacacctgtaatcccagcactttgggaggctgaggtgggcggatcacaaggtcaggagattgagaccattcaggctaacacggtgaaaccccatctgtactaaaaatagaaaaattagccgggagtggtggcgggtgcctgtagtcccagctacttgggaggagaatggcgtgaacccgggaggtggagcttgcagtgagccgagatcatgccactgcactccagcctgggtgacagagcaagactccatctctaaataaataaataaataaataaataaacataaatatatttgtttgtaaatatcaatatattaataaataatatcaataaatggttggtggatgaatggaagagatggattgatagatcagtgggtaggcagtgtatggatgaatggttggatgcgtgtatggatgaatgatcacaggaatagatggatgaatgggtgtacagatgaatggaagaatggatggacagatgaatggacggatgaatttatggaaggtgtattataatagatgatggatgtatagatggaaaaattgatgataggtggatagatgaatgaatggatggataggcgaatggatgagtctatagatggatgatgaatgtatggtggcagtacggacggacagatcaatggacagatggatggatagtgaatgtatggtgggagtatggatggacagatcaatggacggatggatgggtagacagttgggtaatagtgggtggatggatggtgtcttagtctgtttgtgttgctacaaaggaatgcctaagtctgggtaattaatttttttaaagaagaggcttatttggctcatagtccttttttttttttttttttggagatggagtctcactctgtcgcccaggctggagtgcagtggcgcagtctcagctcactgcaagctccatctcccatgttcacgtcattctcctgcctcagcctccccagcagctgggactacaggcacccgccaccatacctggctaatttttttgtatttttaatggagacgcggtttcaccgtgttagccaggatggctaacctgacctcgtgatctgcccgcctcagcctcccaaagtgctgggattacaggcgtgagccaccgcgcctggccttggctcatagttctgcatgctgtacaagaagcatggcaccaatatcttcttctgatgagggcttcaggaagcttccactcaaggcaggaagcctccctgtgcagattacatggtgagagagagaaggaagatgccaggcgcttttcaacaatgagttctggcagaaaataagagtgagaactcactcctgtgagaatggcacaaagccattaatgacaaatccctcccaccagaccccaccttcaatgttggggatcaaatttcaacatgagacttgggaccaaacaaatcatatccaaaccatagcagatggatgagtgggtgggtgatggatggagggagggagggaggaagggatgaatgggtggatggacgacagaatggatggatggataggtagatggatggatgaatgggtgggcaggtggataggtggatgagtggatgggtagatgagtggatggatgggtgggtagatgagtgggtggatggatggatggatggatggatggatggatgggtcaatgggtggatgggtggatggatggatgggcacatgggaggatagatggatggatggacggatgggtcaataattgggtggatggatggatagagaaatggatgggtcaatggatggatgggtgggtggatggatggatggatggatggatggatggatagagaaatggatgggtcaatggatggatgggtgggtggatggatggatggatggatggatggatggatggatggatggatatgtgaatggatggatgaatggatggatgagtgggtgggtggctggatagatggatggatgggcaggtatatgtgtgggtggatggatgggtgggtggatggatggatggatgggcaggtgcatgtgtgggtggatggatgggtgggtggatggatggatggatgggcaggtgcatgtgtagatggatggatgggtggatggatgtgtgaatggatggatgagtgggtgggtgggtggacagatggatggatgggcaggtgcatgtgtgggtggatggatggatggatgaatggatggattaatggatggatggatggatgagtggatgggtgcatggataaggatacacatggatgggtgaggagatgaatagacaggtagttgggcaattgtccctgtgagtcccgcatcaatgggaatgcatgccaccccttccaagggcctcttggctcacaggtgttgcacttccaggattgaatgcagccatctgccactccctggatcccagtctccctgcacagactcatcctgggggaggggacacagagtccacgttgctgcccctcccatgctagcctgcaaacctcctccccagcaagagcagatccaggagccacgaatacggtggaggatgcaaaacggtaattaatctgtggtgggaggggggtgttaataccttaaagacacggggacacactggcagctcctaccaattagtgacctaaccctgccagtgtgctctccgcggtgtggccgagttgattactctaattaattttgcatcgacctacatggatctgctgggagagggctgatcggcatgggagacagatgctgccaacccgtagcacccccctcattgcccagtccacaaggtcaaacgccatcccacctggcctcccgggccctgggaaggtggggtcgctcccgactctccaggacacacaccaagacctgcctccctcccatcctcaaaaagcagaggggggccgggcgcggcggctcatgcctgtaatcccagcactttgggaggccaaggtgggtggatcacctgaggtcaggagttcaagaccagcctggccaacatggtgaaaccccatctctactgaaaaatacaaaaattagccgggcgtggtggcgggcacctgtcatcccagctacttgggaggctgaggcagaagaatcacttgcacctgggaggcggaggttgcagtgagccgagattgcgccattgcactccatcctgggtgacagagcaagactctgtctcaaaaaaaaaaaaagaaagaaagaaagaaaagaaaagaaaagcagaggcgggtacagttggacaacccacactcactcccgccttggtgtccttgtccagcagtggcagggagggctgggagcagagcgccttccagggccaacagacacccctgaattggtcttgatgtcatttcaacctgagaatgaacagcagtgatggaccaggtgtggtggttcatacctgtgatcccagcactttggggaggccaaggtgggaggatcgcttgagcccagaagtcgaggctgcagtgagccgtgattgcaccactgcactccagcctggacaatagagcaagaccctgtctcaaaataaataaataaataaaagacaatagcagtgatgggggcgtcagatgggagagaatggaggcggcatgaactagatgcttacagttcttgaggcttccctgtcttggcttttaccacagcccaggctaaccttaccatgcatgggggagctgccctacatcccaaggtgtattaatttcctattcctgccataacaaattaccacaaacgtggtggcattaagacaacataaatgggccgggagtggtggctcatgcctcctgtaatcccagcactttgggaggccgaggcgggtggatcactcgaggtcaggagttcaagaccagcctggccaacacggtgaaacctcctctctactaaaaatacaaaaaaaaaaaaaaattagccaggagtggtggcgggcgcctgtaatcccagctagtcaggaggctgaggcaggagaattgcttgaacccaggaaggacaggttgcagtgagccaggatcacaccactacattccagcctgggcgacagagcgagactctgtctcagacagacacaaacaaactaacaaaacaaatgtattagcttacaattctggaggtcagaattctgcaataggccttactgagctaaaatcaaggtgtgggcagcactgggtcctcccagaggctccaggggagaacctgtttcccacacccctcagctgggggccccttcctccacctccacagccagcagcacagcctcctccagtctctgattgtcaccttcctgcctccttccaggagggccctgtgatgacgttggggccccggataaccccggatcacctcccattccaagttccttaacccaatcccacctgtaaagtccctttggccatgtgaggtgacaggtgacatatccgcaggtcctggaggttaggacgtagactttggggaggggagttactattctgctgaccacacaggagcatcttcctactgaggcaagtgatccccaactcatgttcagagctggatacagccgcacctgaatgcaatgttaattttattattattttattttattttattttatgtttgagacaggctctcactctgtcacccaggctggagtgcagtggcatgatctcggctcactgcaacttctgcctcctgggttcaagcgattctcctgcctcagcctcccgagtagctgggattacaggcacctgccaccatactcagctaatttttatatttttagtagagacggggtttcaccatgttggtcaagctggtcttgaactcctgacttcaagtgatccacctgcctaggcctcccaaagtgctggagttacaggcgtgagccatcgcgcctggccgtgaatgcaccgtttaacttgaactaacccatcctgagacaacagcctggggaccaagaatctctcccggcttttcccaacaccccagttccccgccccgttttctccattaccagatgaatgatgaggaaggactacagtgttgagttgaactacagacaagattttgttgtttacagctaggtgcatgttcatatatacatacacctttgtaatccccatccaaaaccaagatctgaaacattttctttaccccagaaggcccccttgttcccctaccagtctccaccccctggggtaatcactgccctgacttccatcattaagaactggttggccgggcgcggtggctcacgcctgtaatcccagtactggggaagccgagatgggcggatcacctgaggtcgtaagttctagacaagcctggccaacatggtgaaacctcatctctactaaaaatacaaaaattagctgggtgtggtggtgcacgcctgtaatcccagctacttgggaggctgaggtaggagaatcacttgaactcggggggcagaggttttggtaagccgagatcatgccactgccctccagtctgggcaacagagcgagactccatctcaaaaaaaaaaaaaaaaaaaaaaaaaaaaaagaactggttataacatctgctctggaaattcatcagaatggaatttatgcatgttcagttgtgtctgctccttttatttaagaatatgtttgagagattcgtccgtgatactggatgtttcgatgcttgtagttatttattgttctgtagcattctattatatgaagatacaaccactgggtctaccttgagcaaatctgctatgaacaatcttttttttttttcttttttgagacaacatctcactctgttccccaggctggagcacagtggcacaatcatggctcactgcaacctcgacctcccgggctcaagcaatcctcctgcctcagtctcccaagtagctgggactacaggcatgcaccaccatgcctggctaactaaaaaaagattttttttttttagagacagggtctcgctatgttgtccaggctggtcttgaactcctgagcacacgtgatctcctgaggagatgtctctgcaaaaaattgtatctgcaaaaaattgtaacaattagctgggtagccgggcaccatggctcacgcctgtaatcccagcactttgggaggccgaggcgggtggatcagaaggtcaggagatcgagaccatcctggctaacatgctgaaaccccgtctctactgaaaatattaaaaaaaattacccgggtgtggtggcgggcgcctgtagtcccagctactctggagactgaggcagaagaatggcatgaacccgggaggtggagcttgcagtgagctgagattgcgccactgcactccagcctgggtgacagagcgagactctgtctcaaaaaaaaaaaaaaaattgtcaattatatttcaataaaactgaggtggggggaagaaaaatacaaaacaattgaaggacaaaaaagaacgtggaagaaatggagagacatcccaactgccaggtgaaatggccaaataatgttaaaatgtcaatttcctctatgtgaatccatacatctttatttcaataccaatcaaaattccaatctgacttttgttcagagtgaaggagaaccgaacacaattattttaaaattcatatgaaagaatatacatttcagactcaccaggaatttttttttaagaaaagagtagaggaagggcatttgtttttgtaagaagttgaaatgtattgtaaaatgacaataattataaagttacaatatcgtttacctaaaaactaatcaaagtgtatattaacttagagtggaattgaggcgtctttccctttttggcggggaaggctgtggttggcataactgggtaccattaagaatataataggctgggtgcggtggctcacgcctgtaatcccagcactttgggaggctgaggcaggtggatcacctgaggtcaggagttcgagaccagccagaccaacatggtgaaaccctatctctattaaaaaacacaaaaattagccgagcatggtggtgggtgcctgaatcctacctactcgggaggctgaggcaggagaatcgcttgaacccgggccgagatcgctccattgcactccagcctgggcgacagagcaagactctgtctcaaaaaaacaaacaacaaaaaaagaatataataaagaagctggggacagtggtgcacacctgtaactgcagctactcaggaggctgaggcgggaggatccctagagccagggagttcaaggctgcagtgagctctgattgcaccattgtactccagcctgggcaacagatcaagaccctatctttacaaaaaagtagagactctgtctcaaaaaaaaaaaaaagaaagaaaaaatatatataaaataacgtgggttgtgtattccagtatgtcaaagaaaatctatttctcagaatctaaaatctctctcacaactataaagagatatttatataatggtcattgcagtattctttgactagtttttttttttaaattggcaataatctaaatgtctgtattaatcagggtccctgctatggtaaattgattgcaaaactggtctcaattcttcatgctgtcccggcgcggtggctcaagcctgtaatcccagcactttggagggccaaggcaggtggataacttgaggccaggagttcgagaccagcctggtgaacaaggcaaaaccctgcccgtactaaaaatgcaaaaattagccaggtgtggtagcaggtgtctatagttagtcccagctacttgggaggctgaggcagaagaatggcgtgaacccgggaggcagaggttgcagtgagccaagatcgagtcattgcactccagcctgggcgacagagtgagactccgtctcaaaaaaaaaaaaaaaaaaaaaagtttaataaagagggttgctttattttattttatttattttttatttatttatttttttcagacggagtttcgctcttgttgcccaggctggagtgcaatggtgagatctcggcccactacaacctccacctcccaggttcaagcaattctcctgcctcagcctcctgagtagctgggattacaggtgcatgccaccacacccagctcgtgtttttatttttatttattttattttatttatgtatttatttttgagatggagcctggctctgtcacccaggctggatctcagctgcactggcaggatctcagctcactacaaactcctcctccccggttcaagctattctcctgcctcagcctcccgagtagctgggattacaggcatgcaccaccatgcccagctgatttcatatttttagtagagacaaggtttcaccatgttggccaagctggtcttgaactcctgacctcaggtgatctgcccgcctcagcttcccaaagtgctgggattacaggcatgagacaccgtgcctggctcctatttattttgttgaaacagggtctcactacattggccaggctggtcttgaactcctgggctcaagccatcctcctgcctcagcctcccaaagtgctgggatcacaggtgtgagccaccacacctgttcctataaagaagatttttttaaaaagggctgggtgcggtggctcacgcctgtaatcccagccctttgggaggccaaggcgggtggatcacaaggtcaggagttcgagaccagcctgaccaacatggtgaaaccccatctctactaaaaatacaaaaattagctgggtgtggtggcatgcacctgtaatcccagctactcaggaggctgaggcaggagaatctcttgaacccaggagacggaggttgcagtgagccgagattgtgccactgcactccagcctgggcgacagagcaagactccatctcaaaaaaaataaaaaaattaaaataaataaatttttgaaagatgtagaggccttgagaaacaagacgaatggtgcagaatctccaggctaggaacatgtgggagccgtgagcatcagagactgaaggggttcagggagacagtggccacgggaacttctcctcccactctccaatgtcctataagaattgtttgttggtcaaacccagctggaaaccagagagcaaggaaaccccacgggtcagcctccctgggcacagagcagggccctggggagaaaatggaatttaaccagctcagtgtttatcaatacaagaatggttacattctcaacagagcatcagcatgtgcacatggggtatataaagccattaacagtccaggcatcaaggctcacacctgcaattccagcacttgaggaggctgaggtgggaggatcccttgtgtcaggagttagagacgagcctgggcaacacagtaagaccctgtctctacaaaaagtacaaaaattacctgggcatggtagtgtgtgcctataatcccagatagtctaaggaggctgagttgggaggatggcttgagcccaggagtttgagaccagactgggcaatatagcaagaccccatctcaaatattttttgtttttgtttttagatgacatcttgctctgtcgtccaggctggagtgcagtgatgccatctcagctcactgcaaactccacctcctgggctcaagtgattttcctgcctcagcctcctgagtagctgggattacaggtgcctgctgccacgcctagccaatttttgtattttttttggagatggggtttcaccatgttggccaagctggtctcaaactgttgacttcaagtaatccacctgcctcatcctcccaaagtgctgggattacaggcatgagccactgtacccggcctctgtgaaaatttttaggccgggcgtggtggctaatgcctgtaatcccagcactttgggaggccgaggcgggtgaatcatgaggtcaggagttcaagaccagcctgatcaaaatggtgaaacccccatctctactaaatatacgaaaattagccaggcacggtggctcacgcctgtaatcccagcactttgggaggccgaggcgggtggatcatgaggtcaggagatcgagaccatcctggctaacacggtaaaccccgtctctactaaaaacacaaaaaattagccaggtgtggtggcgggtgcctgtagtcccaactacttgggaggctgaggcaagagaatggcgtgaatccgggaggcggagcttgcagtgagccgagatcacccccactgcactccagcctgggcaacagagcaagactccgtctcaaaaataaataaataaataaataaataaataaaaatacaaaaattatccgtgtgtggtgatgcgtgccttaatcccacctactccggaggctgaggcaggagaatcgcttgaacccaggaggcggaggttgcagtgagcagagattgcgccactgcactccagcctgggcaacaagagtgaaactccatctccaaaaacaaaaaacaaaacaaaacaaaaaacaaaaagggatgttcatatctctaagtgcagctacatttttaaaagcctaaattattatgaatcaaaataagagaggtatcaacgccatgtaggagcgtggaacagaaaaagaacattcctgaaaagcctggtgatagacaaataaagtctgtaagatgtcagactgtaggctggggacggtggctcacgcctgtaatcccagcactttgggaggccgaggtgggtggatcacctgaggtcaggagtttgagaccagcctggccaacatggcgaaaccccatgtctactaaaaatacgaaaattagccggacatagtggcacattcctgtaatcccagctactcaggaggctgaggcaggagaatcgcttgaacctgggaggcggaggttgcagtgagccaagatcacaccattgcactccagcctgggcaacaggagcgaaactccgtctcaaaaaaaaataaataaataaaaaataaaaaaagaactgaaattaattatcaatgatgacattttcttcattttactttttaatattttctaattagtttttcagtcagaaagaaagaacggccaaccatgtacggcaggtcacagataatatgcaaagccatttctgtaaacgtctttaatatttatgtacaattattttgcacgtatgtgcatgtttacaggcaagacacttccaaagctttctctctggaacagtgagattgataattttttgttgtggtggttgatggtctccattttactacagttttaccacccaagacacgcattgtttgtgtaataaaaaataataactagatttatttttctacctccttcacttcccctgtggcctctctcgaatttgcccgacaacctttcccaacacccatgataattgatccttaatcaaatattcaaatgggtgcttcaaggaaaggcacggtgctttggcaatttggatgataaataatatttcttcgctttgtcccccccacgctgcttctccctccctagtccccctctttttgcagcccaaccccgacgtcgccccccgccccactagaatctcgcaaatatcttttggttttaagagttccctggggaagccttgttctaaatgaggtgtaaaaatctaagcggcacaaaaaaaaaaaatagtgcgaggttggaatcaatattctcttcacagctccatcgattaacaaccatattcttcatttattaattatgaagggggatttcagagcctccgtctccttctttcgtggtaacatggcggcttcccctcctccctgcctcccccaggtctggggcctgtggtacccagggctcagcatccccggggccaggggaagagggagggaagtgggcgttctgcccccactggcaggtccagccaggagcagagagctctgtctggctttggaatctgcctcaacgcaaaggagtctagttctccgttcccgtgctggctttgccatctgtctctttagaagacaagctccatggccgggtgtggtggctcacgcctgtcatcccagcactttgggaggccgaggcaggtggatcatctgaggtcaggagtttgaaaccagcctggccaacatggtgaaaccccgtctctgctaaaaatacaaaaaattagtcaggtgtggtggtgcgcacctgcaatcccagctactcgggaggctgaggtaggagaatcgcttgaacccaggaaggcagaggttgcagtgagccgagatgctgccactgcactccagcctgggcaacagagtgagactctgtctcaaaaaaaaaaaaaaaagggggagataagctccatgtgggaccttgtttgctttccccagctgtgtttctgactctgggcgcacgtgctctatgaaactgtgctgagtgagtgataagacagtggcagaatcacatacacaagagacgggaaggaaagagtggagttcaaaagctggctctgactacggtccattcatgtgcgttggcctctgggagtctcgcctccctttctgctgctctatttctgaccctggacacacatgctcagtaaagctgtgctgagccagttaaccatgagcagggtggcggagtgcggcacctggcagccctggatctcgctttcctaacctcgtgggcctcagttttctcatctgtaaaatggcacctccatcagatgaggccatacctcatgtcagcctttgtttgggctgaacccccttgtttatattggggggatgtctttgatctgggaagtcactgggtcaggacgcaggtcagattcacctttgtccccagagcacagcatcaggatggcccagaagtgatcactgaaagttcttgcgggtggacaaatggatgggtgggaggttggatgggatggatgcatgagtgagtgtgtgggtgggggatgaacggatgtatgggagggcagacgagtgaatgggtatgtaagtggatagatgcgtgaatgaattggtcaatgagtctgagtgtagttggatgggtgactggaggaattgagtgaatggatgtatggatagatgggtacatgggtgtgtggatgggtggaagggtgagtggataggtagaacaatgaatgggtggatggcaaaataaaagataaacaatgaatgagtggatgaatagatgggtaaatggtctggtgaatggatcggtgggtggctggttggctaggtgggtgagtggatcgatatatgagtgaatatatgtgtaatgagtgggagaatagacaaatggctagatggatgggtggacggatggctagaaagacagacaaatggatgagtggatgggaggataaatgggtggatggatgggagggtggatggatgggtggatggatggataggtgggtggatggatgagaggatgggtgggtgggtggatggatgagaggatggatgggtggatggatggacagatgggtagatggatagaaggatggctgggtgcaggaggatgaatgggtggatgggaggatggatgtatgggtggatggatggataggtgggtggatggatggatgtataaatggataggatagatgaatggatagatggataagtgggtggatggatgagaggatggatgggtgtagaggatgaatgggtggatgggaggatggatggatgagaaaatcagtgggtggatagatgaatgaatggatgagaggatggaggacaaatgggtgggaggttgaatagatgaatggatgaataggtgggaggatggatggagggttgggtgagtgagtggatggatggacagaggggtgggaggatggatggatggatggatggatggatggatggatggaacatggatggatggatggatggatggatagatggaaagatggatggatgggtggatggatggatgtgtagatgggtagatggatgggagaatgaatgggtgtgagaggttggatggatggatgggagggtggatggagggatgggtggatggatggattcatgggtagatggaggacggataagtgtgggaaaatggttggatgataaatgggtgagtgtcttgatggaggggcaggtgggtgggttggtgggtggatggatgggtagatgggtagatggatgagagaatgaacgagtgtgagaggatggatggatgggagaatggatggacaggtggatggatggatggatggattcatgggtagatggaggatggatgagtgtgggagaatggatggatgataaatgggtgagtgtcttgatggaggggcaggtgggtgggttggtgggtggatggtgggtgagtgggtgggttggtgggtggatggtgggtgggtgggtggatggtgggtgagcgggtgtgtggtggatggtgggtgggtgggtggatggtgggtgggtggatggtgggtgagtgggtgggtggtgggtgggtgggtaggtataggtgggtgaacacagggcctcagcgggattattttgcgttggttcccggtgcagcacttaagctttccggagctccctttccaagtatttgttgtacctgtaggaggacacctagtccggctcagttctctgtaaaggacagtggggtgcagtggggagggggaggggaggcctataagagggtctcatcagttctccagccggggactggagctgggatcaagtggtgggcggaggaggggtgcaggggggaagagcagaattccagggccagaagggactccaggttgagtgggaagcccagccacccagcctggccccctctccacctccctgacggaccctctaacaaccgaactggccgctcccctccctgcccaccaccaccctccagggctcccgacgcccctgcccatccccccgcccctcccccactccaagcgctcccagcctccccctcccccggccgtgtctgtaccccgcccccctgctctccgcgggggcccgggaggagaggaggcggctccgtgctgcggggtgccggggcgcagagcccgcggcgggagctgtcagcgccgatcgtggggagggggctcctctgccccaggtcgatgggagcgggggcccaggctgcggtttacactgaatccacaaaaatcaccgaagcttgaaaagtgctcaataagccatcgatcgctctctgctgatcggtgccgccgccgcagcggggctggggggaaaggcggggcgagcagacccaggctccctgcctgtgccccacgcgggaccgcggccctgcatctgccccccacccacgcgaggctgcagccccagggcctgggcaagaggttcccatcccgcctgcaggcccgggctgcaggcctgaccacgctgaggggtggggagggagggggttagaaagaacgccccctcctctgtcctcccaaagctctctgtggccctgggactgcaaaattcttccccaggccgggcgcggtggctcacgcctgtcatccctgcactttgggaggccgacgagggtggatcgcctgaagtcaggagttccacaccagcctggccaacatggtgaaaccccggctctactaaaaatacaaaaattagcctggcgtggtggtgtgcacctgtaatcccaactactcgggaggcggaggcaggagaatcccttgaacctgggaggcagaggttgcagtgagccaagatggagatactgcactccagcctgggcaacagagcgaaactccgcctaaaaaaaaaaaatccttccccagatacttccagagatatggaattaagacaaatcctggctcattcactgtgactgctgtgtgaccttgagtgtgtttcttaacctctctgtgcctccattgccatatctgtaagatggatatggcagcacgcaccctgcctgcaattcatggcttccttagggtctcacttgtgaatctcctctggccttttggcaacttctttccttctcagctggggaagccgttttcctgcctgaaaaacctcttccccagtgcaaggcttggaggctggacacagttcggggcattcagggaactgccagcaccagtggccatgtattcgggaggaggtgagtgggaagaggtgaggccatggggtgggcagccacttgccaggggcagtgtttgttcttaattctggaggtagcagggagccatggaggatctagagcagaggtgtgacctgaatcaaatcgctccttccccagagctgagcctctgtcctgggttggcctctgtgctgatctcacctcctcttcctctccccccatggcccactggtcaccactcctggcccttctccctctgaagtctctcccattgaccccacactggctctctagggacctcccaaggccagatctgaactcggccctccctcactctaagccctcccaaagctccctgtggccaacccaagcccttggcccagtgctctacccccactctatgaacgagctgttccactgcaagtccagccacgcgccgcccagcccgccaggcccacctcccaccgcagcaccccctggctgttgtcacactcgcccgcatcccacccagcctttgcccagcagttcctctggactggaggtcgttccccaccctgcatgctggcgaaagcactcctcatccttcaagcctcttttccaggagccctcccaggcagcatctcccagagacagccccagcccgaggcctcctccgagccctgtctgcgtcttctcttgcagcccaggctgggggtgccttctggctgggggcaccttctgcctgttttgtagaaggcggaagaacgaggtattggtagcaggggctggggttggaggagcccaagagacacaaagccagaaccttcctccaactgcctggaaatctgaggccccactggtagatcttgcctcccacagctccctctggcctttcagcacagcccccaactgacacccagaaggacccccccacaccaggtcccaaggggagagagagaagagaaaaaaacagagagaaaaggcaagtgggatcagggcctccctccactacccgtttcacaagacccccccttctttctggaggcccccactctgagagtctcagctcccccacccgagccccccatctgatctgtgcaggctcaggggccgcccccactccctccctcaccctctccccaaaggtcagggagcaaatttcatccccacgtgtctctcacacctcgatgattaataattgaagaaaacgtatttctttgggggcccaggatacatcagaaataactacagaattcatatgctgccagaggcacgacacccatgggaagacagagccaggagaggggcacgggcttctgagggcccagaagctgacggcgctgcagaatgatttcaaaaccaccctaatagaatcacccatggaggacgttctcagcactgggaaggcaccgtgctgaggctttggaagccaatgacctcaccagctccattttacagatagggaaaccgaggcacagaccagggaagtgacttgctcgtggtcacacagtgggattcaagcaaagaccgtcccccacacccctttaacctgtcctcccgtcaccagtgccacacttcctgcacccaggatggcacaagggcatagaggccgggggcatggggaagctctcggtcctgcaccctgacagcctgtggcctgctcatcacagacgcgtcatccccactcacccagcatgtcttgaaattttttttttttgagacggagtctcgctctgttgcccaggctggagtatagtggcgcgatctcagctcactgcaacctccacctcctgggttcaagcaattctcctgcctcagcctcctgaatagctgggactacaggcatccgccaccaagcccggctaatttttgtatttttagtagagacggggtttcaccacgttggccaggctggtctcagactcctgacctcaggtgatccacccgccttggcctccccaagtgctgggattacaggcgtgagccaccatgcccagtcatgtcctgaaaatcttgaggcatctaagttccgatgccttgcccaggctcgtttaatcctcacaaccacccctgctcacacaggagaagaccaaagctcagagaggtgaagccacctgcctggggtcccatgacacagggaggcaaattcaggtgtgtccttcttatgagtctgtcttatgagtcctggcattgcccctctcattggcatctttttttttttgagacagagtcttgctctgttgcctagtctggagagctctgcagcctctgcctctcgggttcaagtgattctcctgcctcaggctcctgagtagctgggattacaggtatccaccaccatgccgggctaattttttttttttttttgtatttttagtagagatggggttttgccatgttggccaagctggtctcgaactcctgatctcaagtgatccgcccgccttagcctcccaaagggctgggattacaggtgtgaaccaccatgcctggccccattggcatcttgaggctcagccccatgtgaggtgggacgggtgatgcttgaccccatatggggcctgccccaggatctacttgatggaaattgaagatgtcagaagacactgaggtgcatccaggttcagagatgtagctgctgcactagccaatgggtggaggtgcccaagcgtccatcaccagaaggatggatccacacaactcagccacaaaaaggaatgaggctctgacccaggccacagcatggatgaagcttgaggacatcacactcagtgagagatgccagacacagaaggacaaatcctgtgtcactccacgcatgaaagtgccctagagtcatcagatccagagatagaaagtaacatgggggctgggcatggtggctcatgtctgtaatcccagtgctttgggaggctaagttgggaggatggcttgaacccaggggtttgagatcggcctaggcaacgtggcgagagcctgtctctacggaacatacaaaaattagccgaacgtggtggcacctgtaatcctagcactttggaaggctgaggcaggagcatggcttgaacccgggaggcagaggttgcagtgagccaagatcgtgccactgcactccagcctgggcaacaaagtgagactctgtctcagaaaaaaaaaaaaaaaaaagcttgagatgggaaactttatttatatatgttttaacaccgtttaaaaaattttgggccaggcgtggtggctctcgtctgtaatccccgcactctggggggccgagatgggtggatcacctgaggtcaggagtttgagaccagcctgaccaacatggtgaaatcccatctctactaaaagtacaaaaattagcctggcgtggtggcgtgcgcctgtaatctaagctactcaggaggctgaggcaggagaattgcttgaacctgggaaacggaggttgcagtgagctgagattgtgccactgcactccagcctatgtgacacagcaagactttgtctcaagaaataaaataaaataaaataaaacaaaatttttcagaaagggatgaagttctgacccagaccacagcatagatgcaccttgaggacgtcacgctcagtgagagacgccagacacaaaaggacacacagtgtgtgatcctgtttctatgaaatgcccaggaaaggcccatccacagagacaggaggggatggaggggtcagaaattctagatgctttttcattcaggtgtacgtgctgggggggcctttattattcacgtgcccatcctccgcttatttcaatgtgttacccttgcccgatgctgctcttctgctgtgttccggaacaaaacgtactgggcatagctttgctacccaagcgaaggggactgagaaacagcggtggcctcctccttgggtggaatgctgggtggtcatcaaaggtgatgggggaggagacatttaaatgacacgggaagatgcccgtgagataacaggaaagacacagaccacatgagagtcagaggtcaggtgagcccattttggtaaaacccctgtctgttgtttttttaagagaccgggttggccgggcgcagtggcttacgcctggaatcccagcacttcgggaggccgaggcgagtggatcacctgaggccaggagttcgagaccagcctgatcaacacggtgaaaccccgtctctacaaaaaatacaaaagtagccaggcgtggtggcgcatgcctgtaatcccagctactcgggaggctgaggcaggaggattgcttgaacccaggagacggaggttgcagtgagccaagatggtgccattgtactgcagcctgggcaacaagagcaaagccctgtctcaaaaaaaaaaaaaaaaaaaaaagagagagagagagagagagggtcttgctctgtcacccaggctggagtgcagtgatgcaatcatagttcactgaagcctccaactcctgggctcaagagatcctcctgcctcagccttccaaagtaatgggaccatggccaggcaggtagctcatgcctgtaatcccaacactttgagaggccgaggtgggcggatcacctgaggtcaggagttcaagaccagcctgaccaacatggtgaaaccccatctctactaaaaatacaaaattaaccaggtgtggtggtgcatgcctacaatcccagctacttgggaggctgaggcaggagaattgcttgaatccagtaggtggaggttgcagtgagccaagatggtgccattgtactccagcctgggcaacaagagcgaaactccatctcaaaaaaaaaaaaaaaagaaaagaaagaaagaaaagaaaaagtaatgggaccacaggaactcaccactctggctatttttctaatttttatttttgtagagatgagatctcgccatgttgctcaggttggtcgcaaactcctggcctcaagtgatcctccgacctcagcctcccaaagtgctgtttttataggcaagagcgatggcgcccggcctcctagagctttaggagggagtatggccctgcccacaccttgatttcaaatttcaggcctctagactgtagaaaaatacatctgtggggttttttgttttgtttttagagacagggtctcattctgtcacccaggctggagtgcagtggtgcgatatcagctcactgcagccttgacctcctgggctcaagtgaccctcctacctcagcctcccaaataattgggacaaaaggcaccaccacacctggctaatttttgtatttttttgtagagatcggagtctcgctatgttgcccaggctggtctccaactcctggcctcaaataatcctcctgcttcagcctcccaaatcattgggaccaaaggcaccaccacgcctggcaaatttttgtagatatgggtggggtgggtctcgctatgttgtccggactggtctcttaactccaggcctcaagcgatcctcccgcctcggactcccacagcgctgggatcacagcctccccccgccccgaggtagcgggtggtgggaacgggattggaatcccgactgtggggcccctgcggccacctccaggatacagcggaccccgatgaagccctggcctgggtgctgggggaggctccgcggcgcggtcccgcaggcgggaggcgatgctgccgacgctattgctgccattactattacggagagatggggcggggcgggagcaccgggcccttcccggaagcccttcctgagcttattcagtgcctggggccgcggcgatcgatgacagctgggcgccggccgagccccctccgggccgcgcgggggcgcatgcgcggggccgcgggatcgatcggccgcgctcgggcctccccgcacccgcccgaccccgcccccccggctcgttgcccggcaacctctgcccggcgcgctcccattggctggcggcggcccgggccccggccgcgcgtggtcacttggtcagcgcgggctcggcgtggccgggggcctggctccgggcgcgggtcgatgccgcctcgcatctgacctttcccggcgcggggagggggcccgagaggatggagagagctggaccatcttggaagaaaactttattgacccgtctcttatcttggggacgcacggttccagcggcggggggcgagggtacggctgggtgggggcaggggcggccaggaccttcctcccggacatgcacggaccccctgaccgccgccccggccatctccctgggcgggctgctctccattccctagacaggaaaattgaggctcacgagggcccggggattacccaaggcgcaaagggtttatgaggtgcaaggggcctggagcccagagagtgtggctcgagggcttcagactctctctgccacgccgtgctgacatctgcaccctccaagcaaagctaaaacatcttcccgcgttgctgggtcccacaccgtcgcagcctggaacccaccaccccataaggagggaccgttccttaaattgaaatgcgatgttgaacagccacgaaaaaggacgaaatcgtgtcctttacagcaacatacgtgcagctggaggccattatcctaagcgaatgaaagcagaaacagaaaaccaagtacccatgttctcgcttatcagtggaggctaaacattgggtactcatggacacgaggatgggaataatagaccctgaggacttctaaatcggggaaggtgggggacaggggctgagaaactcctgggtaccatgcttagcacctggatgacgacgggatcggtcatatcccaaacctcagcatcacaccatatacccatggaacaaacccgcatatgtactcctgaatctaaaattaaaaagatgaaatttcaaaatagtaataggaaggggccaggcgcggtggctcacgcctgtaatcccagcactttgggaggtcaaggcagtggattccttgaggtcaggagttccagaccagcctggccgacttggagaaaccccgtctctactaaaagtacaaaaattagccgggcatggtggtgaatgcctgtagtcccagctactcgggaggctgaggcaggagaatcgcttgaacccagcagacggaggttgcagtgagctgagatcgcaccactgcactcctgcctgagcgacagagcaagactctgcctacaaaaattaattaaaaataataataataggccaggtgtggtgtggctcacgcctgtaatcccagcactttgggagaccgagacaggagtatcgcttgagcctagcagttccagactagcctggacaacagagcgagaccccatctctaaaaaataatatatatatttttttgagatggagtttagctttgtcgcccaggctggagtgcagtggtgcgatcttggctcactgcaacctccacctcctgggttcaagcaattatcctgcctcagcctcccaagtagctgggactacaggcacgcaccaccatgtcccactaatttttgtatttttagtagagacggagtttggccatattggccaggctggtctcaaactcctggcctcaagtgatcctccaacctcagcctcccaaagtgctgggattacaggcgtgagccactgcgcccagcctaaaaaataataataatttaaaaataataaatgcaatgttgaaattaaaaggcttaggaacagtgtgagatcttcatgtccaaacgaaactcccattacacagaggccctgtgaggggaagccccaagtcaaggtcacagacttgagaaaagcttatggttattttgaaggggatatgggtagtgccctaaacattccaatttagtaaaaaaaaaaaaaaaaaaaatcgcaaatcccccaacaaccacttgggctcattcaaatgaacacctggactttgtcaaaagaagagttattgtcagaataaagacgctgcttataaaatgctagggttccctgtgtggagccaagaagatttcttctttctttaagggtgaaaaacaagattggcttatttgacagatctgtgcatttttttttttttgagacggagtctcgttctgttgtccagactagtgtgcagtggtgtgatctctgctcactgcaacctccacctcccgtgtacaagcgattctcctgcctcaacctcctaagtagctgggattacgggcacatgccaccacacctggctaatttctgtatttttagtagagacagggttttgccatgttagtcagtatggtctcgaactcctgacctcatgatccgctcactttggcctcccaaagtgctgggattacaggcatgagccaccgcgcctggccgtaaatgttttaatatttagcacgcatgatgcttttgatatacgtgccatgccaagtccagggctcagagatttgtttaaaggtctccattaatcccacatgtaccccaaatcgctgtggttttagaaaagaaaaccttctgtgcaactccgtaaccaccttaaaggaaatacaaaaggagaaaatcgctggccgtagccttctccaccccctaaactcagccctggccactttgctcaggcctcccagcttctgtgtcctgcacgtaagcctcggtcttcacacagtccctgatatctgcatttatttcatatttttcccataacgttccacctgacatctccatctccttcctctgccgctgcgtttctaattcctaacagctgaggaaggttgcattgaccggcggattgtgtggggtgatttttgaaagcagatcctggaattcaatttttattttaacctggttattgagtggggagggagagggaggcggaggttggccgattcgtgtgcaagatgaaaaagctggattttcacaaaggttgtgctgtttggaaatggctggttaggttttcaacgtaggaatggttcaacgacagccctacgagagtgtgcgcgagcgtgcgtggctccgtgtggtttcgtgtgtgtgtgtgtgtaagtgagctgcagggtgtgtggacaagtgtgttgtgtgaatgtgcatgtgtgggttcgtgtgtgctcctgtgtgttcccgtgtgtgcatgttgtgttcctgcatgtacatgtgtggcttcgtgtgtgtgcgtgtgtggttttgtgtgtgtgcatgtgtgtgcgcctgtgcgtgttcgtgtgtgtttgtgtgtgtgcatgcgtgtgagagggtgcactcagcggctgtgcctttgtacacgtgtgaatgtgggtgtgagtgtgtaagtgctttgtgtgagcatgtggggggaaggacgcagaggcacgccagcgtctgactgtgtgtattgttaagagtgttgtggggtacacgtgtgtatgtgagctcgtgagggtgtgcaagggatacacgcgtgttgtgtgtatatgtgtatgtgcatgtgtgtgtgcaggtgtgtacatattagtatgtgcagatcagtgcatacctacgtgtgtgttcctgtgtgcagatgtgcggccatttgagggtggcagtgcgcctgtgtgagtaggtacctaggacagcgtgcctgtgcatttgtatgtgagtgtgtgtgctgtttttgcacgcatgcaccggtgtgagggtgtgtgtgtatcggtgcacatctatgagcatgtcagtgtgtgtgagtggcagaaggtacacgggtgtgtacgtgcgtgtgtatacctgttcgtgtacctggcagtgtgtgggcatgtgcgggtgtgagggtgtgtgtgccggtgcacaccagtgtctgcacctgcgaccaccccgaccccgtgcccagccccctgaccctctcctgctgttctcactgcggggaaacgggtccaaccccaccactgaccccagctcatctcaggcctcccgtccacagccacttcctcaggagccctcctggacccgccagcccgggtctgaccccggtatcagcccgaggggcctcgtcttgaacggaggagccgctggttccactcatgcatttatttcataaatgttggcctcccgggagctccataatggcagaggcctgtccgccttgagcaggggtccctccccagagcctgggattaaagaagagaacccagtggtcctaggtgcgccgtgagaacatcaaacatcggccagggctgcacacgggaggccctcgggggtgcagcgtggaagccccctggacagatggagaagctgaggccctgtcaacaggtcccccgcgtcctccccggccctgtgttgatgggcggcagctgtgtccaggcacgctgtccccgttggacatggccggacgcatggatttccgaagccatctctccatctggcagctttattaacccaattccagggatcgagtgattgacgtgtttgcttatcggctcctcctgtctctccagggacgggtgcccaggtgcccccaccccacctccatcggcccagggggagaggggacaccagatcccccccacagccccgagaccaacgcgcgcacgcacacacacacacacactcacagtgactcccgctcaggggctcttggtggctggatcaattcaagtggatctttggagaacatgatgggccaatgtctaacaaaatttaaaatgtgaactcaggccaggagtggtggctcacgcctgtaatcccagcattttgggaggccgaggcgggcagatcacccgaggtcaggagttcgagaccagcctggccaacatggtgaaaccccgtctctactaaaaatacaaaaattagccgggtgtggtggtgggtgcctgtaatccaagctactcgggaggctgaggcaggaggatcccttgaaactgggaggcagaggttgcagtgagctgagatctcgccacttcactccagcctgggcaacaagagaaaaactccatctcaaaagaaagaaaaaaagaaaaaaaaattagccaggtgtggtggtgagcacctgtggtcccagctatggaggaggctgaggtgggaggattgcttgactctgggaggttgaggctgcagtgtgctgacactgcgtcactgcactccagcctgggagacagagcaagaccctgtctcaaaaaaaaaaaaaaaaaaaaagccagacacggtggctcacacctgtaaatcccagcagtgtgggaggctgaggcaggtggttcacctgaggtcaggagtttgatactagcctggccaacatggtgaaaccccatgtctactaaaaatattttaaaaattagctgggtgtggtggcaggcacctgtaatcccagctactcaggaggctcagacaggagaatcgcttgaacccaggagacgggggttgcagtgagccgacatcacaccattgcactccagcctgggcaacaaacgtgaaactctgtctaaaaaaaaaaaaagctgggtgcaattgctcatgcctgtaatcccagcactttgggaggctgaggtaggcagatcacaaggtcaggagtttgagaccagcctggccaacatagtgaaaccccatttctactaaaaatacaaaaattagccgggtgtggtggcgagcgcctgtaatcccagctacgtgggaggctgaggcaggagaattgcttgaacccgggaggcagaggttgcagtgagccgagattgtgccattacactccagctctgggtgacagagcaagactccgtctgaggaaaaacaaaaacaaaaacaaaaacaaaaacctttctagatatattcattgaaaaggctaggtgcccccaaatgagttggcaacttgtgtccacacaaaaccctgcacacgaaagcttatggcagctttattcatagctggccaaatcaggaagcaaccaagcttcccttgagcaggtgaacgtatcagtgggctgtggtgtattcagacagaggaggatcattcagtgctggaggaatggcatgtccagccttggaaaatatggaaaggagggtaggagtggggagggatgaaaaactacccaccgaagctgggcgcggtggctcacacctgtgatcccagcactttcggtggccaaggtgggaggatcacctgaggccaggagctccagaccagcctggccaacaaggtgaaagcccgtctctactaaaaatataaaaattagccgggcgtggtggcgggcgcctgtaatcccagctactcgggagtctgaggcaggagaatcgcttgaaccccagaggcggaggttgcagtgagccgagattgcaccactgcactccagcctgggtgacagagggacatttgtctttaaaaaaaaacaaaaaaaaaagctacatgctgaacagtgagtagagactggtcacattaagtcagagtatgtctctaagtatatacagatacttttttttttttttccccttgagacagagtcttgctctgtcacccaggctggagtgcagtggcgcgatctcggctcactgtaacctccgccttctgggttcaagcgattctcctgtctcagcctcccgagtagctgggattacaggtgtccaccaccacgcccggctaatttttgtatttttagtagagatggggtttcaccgtgttggcgaggctggtcttgaactcctgacctcagatgatccacctgccaggccctcccaaagtgcaaggattacaggcgtgagccaccgtgcccggccacggatactcttcatggtgtgtatcatgaggccctaggacagataatgaaggcttccacgtccaagggcacagggtggcacgggaagggttgaggtgggcatttatttttttgctgtttccatgtaagttttgtttctcccacgtatatatgtatattacttgctcaaaaacagattgcaaatgtgacaaaaattacagatacctattttgtagttcagcttttctgaggttcgcaggacaggggacgcccctcccacagcccagctcctctgcagatggctctgatctgacttccccagggacccagggcttttctcccgtgatccctgctcctggcctccagttcccgaaactcaccagctctgagcaggtaggaaaaagtggcttgtgtctacagagcccagttcttctataaagtgaaaacaggcagcatcgacaagcataaccgccgggcacggtggctcacgcctgtaatcccagcactttgggaggccgaggtgggtggatcacctaagatcaggagttcgagaccagcctgaccaacatggagaaaccccgtctctactaaaaatacaaaattagccaggcatgctggctcatgcctgtaatctcagctactcaggaggctgaggcaggagaatcgcttgaacctgggaggcggaggttgctgtgagctgagatcgtgtcatttgcactccagcctgggtaacaacagtgaaactccgtctcaaaaaaaaaaaaaaatccactccaggctggacatggtggagggcacctgtagtcccagctactcgggaggccgaggcaggaggatctcttgaacccaggaggtcgaggctgcagtgagccaattctcctgtctcagcctccctagtagctgggattacaggtgccctccaccactacactccaccctggacaacagagtgagaccctgcctcaaaaaacaaaaaaaacaaaacaaataaaaaaacaatgcagtcctaccccttgcctggctgcccctgactcttaagggaatgatgacacctccccgccaggcccacagacgctgccgacccagcccctcctcacctcaatgctctcctaacccccaagcctttgcctgcttttcctacttctcttcactgaatgaactcctgcacctcctacgcctttcggggcaacggtgcccttctcaactcaggctcccagacccgctgtcagccatggtttaaagtctgccactggccgggcacagtggctcatgcctgtaatcccagcactttgggaggtcaaggtggaggaccacttgaggccaggagttcaagaccagcccgggcaatataaaattcgctgagcatggcggtgcaagcctgtagtcccagctactcaggagctgagtggggaggatggcttgagcccaggagttcgaggctgcagtaagctatgattgcaccactgcactccagcctgggtaacagagcaagaccctgtctctaaaaaaataaagtcagccaccaccctcacactgtgagcctctcccatcaccacagggccttccatggccagctccaggcctggcatcagcgggtgcaggaaaagctcagtggagcgattccacatctagggctcggcttgtaaaattaaaataagtggagacccccccacaacccccagccacacgcaggcagtaggaacccgggagatgggacgagcgccgaagggttattagcagatgcctcgagccccctcgagccccgcagagtgggggaggatggcggaggcccttttaaggacccagtatcaccgtcctttctcggccagccgggcacccacccacctgagtgagcctggagcagcccattaagcgatttttttcctccacttacggttggcagcatcgacaagcatgctcgatatctgacgaggtgctggccttggaagagagcgagccgcctcgataaactattccctcttgtcagcgcctcctcccgcacccagcccggagcttcgcgtttgatcccctcccctaatgagctcggttttctcccctccaggcggatgagacgctccccccaccctcgcccgctcagcctttcaagttcagctgggctgagattcaaggtgggggcggcggtggtggaaggaaaaccatttccaggttccgatggggtcacctcccccaggaagtcctcccagaatttctgcagctcagatggtctcgtgcatttgtggggagggtctggggtacagaaagagactgggacctagatatggggggtcgtacagcagtgtccaggtgccacgattgtcatctgtccattcattcaacaaagggtttgggggtgcagagctgggcacaggtgctcccagctgaggactgtgccaacgtgaggggctgggcaggatggggcaggggcccaggaggcggcagagcagcagagaccctcaagaggggacgatgacagcctgatgaacggacacagagttggccaaaccgggcttggtcagcctgcctggaggtgggggagagagtctgaaccccacccggggaggggcaggcaggtggcagggttgggagaagcccccttcccagaccagagaccctccagtctggcttcagcaccaagaacagctccctgcctcttcctctctggagctccagagggacccccatttgtcagatgtcccccagtcgtcgcccagatggaccagcttcttcctgccgaggccttcagggcctcccaggacctccctgggctctagtattttcaataaaataggaatcgtgccgcaacctcagggggtgggcacgcacagacatcaatgttgtttgcagacaatgagtcactggacactggccgatttttctcagcatctccaatattgcaaagtctacccatggaaggggcttggggccaggtgcagtggctcacatctgtaatcccagcactttgggaggccgaggcgggaggatcacttgaggtcaagagttcaagaccaacctggccaatgtagtgagaccctgtctctgcaaaaatttaaaaattagctgggtgtggtggtgaatgcctgtagttccagctactcaggaggctgaggtgggaggatcgcttgagcctgggaggtcgaggctgcagtgagccaagattgcgccactgcactccagcctgggcgacagaggcagatcctgtctctaagaaagagctcaggaagagttgggggaaatgagccaataaatcatttcaaaatttaaaatcagatccaaccccctagttttattaaaatggaacctgaggcctgagaagaattatgcccctcccaccagccagattccagaatcttctctccaggatgaagggcctcatgggcaagaggaggccaggagggaagggggcttccaaggaagacttccacccaccaaaaggagccccagtcaggcgcggcagctcacgcctgtaattccagcactttgggagtccaaggcaggcggatcacctgaggtcaggagttcgaaactagcctggcaagcatggacaaaccccgtctctactaaaaatacaaaaaattagctgggcgtggtcgcaggcgcttgtaatcccagctactctggaggctgaggcaggagaatcgcttgaacccgggaggcagaggttgtggtgagctgagatcgtgccattgcactccagcctgggcaacaagagtgaaacttcgtctcaaaaaaataaaaaaaaggagccccatccattctccaaattataatggtgcactgtgcagggtgttgctgaggtcctggaagagagccagagcccccaggaagcccccccagggtcagggaagacaagggacccagaactgggccagagggagagacctgagtctaggggaagaggaagtaaaggccctgcggtagagtgggcattgaagctgggttctgcaggtagagtaggagtttcttagcaagagctaggagaacatggcccatgtggacagagtcgagaggggctgacacctgggctcaggttgggggatgccacctcctcagaggggactgtaatggtggatctggaagacccaggcttggagccaggctggtgagcccggctcacagcccaaggtttgctggggcctcagccaggactaggagcaggtggtggcagttggaggtgggctggaggagccgggcctgcccagagggacccaggcacccacggggcgagcggcgagggaggcagaaagcaaagcctcaccaacccccccctccactcaccagacatcaaacccagcctccccacctttcgaggttattaatttttcagagaagaaaatgctttttgtattttttccaggcaaaatattgataatgggcttaatgtggccttcctgcttttgtgtgtcgggagagagagcttttctgtcctggccgctgcagaagctgttcgcccccctccagcccccgcagcctccatcggcagaccccatgcacttggccgctgaagcccaggcagggagtgggggcgcgttttgatcgccaccgagcgggttggtgcagcccccctccccatctcgagccctcctacctccgcctgcacaaagccggacgcctgcccgccccaccgtgggtcgatgcaccctgccaggggagctggtgtttcccgcggctccaggctgatacatctttgagttgtttgaaattttgcttcctttctctcatggcgacggggaggcaggaaggcaggggcctctgtgcattcactccttcattcatgcattcattcattcactcactcactcacccagcccccagtcaccatgcacctgctgtgccccaggctctgtgctggatgctggggccaccggccgggacagatcgggcccctgcctcctcaaagttcatagtccaggagagagaagaataggtacaaagccaaaaacttccaggagaaaatatggcattacggacggtgatgagaaccctgtaagacagacacaggaggcctggtgcagtggctcacacctgtaatcccagcactttgggaggccaaagcgggcagatcatgaggtcaggagtttgagaccagcctaaccaacatggcaaaacccagtctctactaaaaatacaaaaattagctgggcatggtggcaggcatctgtaatcccagctactcaggaggctgaggcaggagaatcgcttgaacccaggaggcggaggtggcagtgagccaagatcgtgccactgcactctagcctgggcgacagagtgagactcggtcaaaaaaaaaaaacagacacaggagagagaaactgtgacacaggggagagccaatggaggctggggtctcagggagggcttccctgaggcagtgacctcagctgagacctacagaatgaggatgaggccgggtgcggtggctcatgcctgtgagcctggcactttgggaggccgaggtgggaggatcatttgaggccgggagtttgagaccaacctgcacaacattgtgaaaccctttccgtataaaaaatagaaaaaaaatagccaggcatggtggtgtgtgcctgtggtcccagccacgcaggaggctgaagtgggaggatcgcctgagcccagaaggtcaaggctgcagtaagctgtgatggcaccactgcactccagcctgggcaacatagcgagatggtgtctctacaaaaatttttaaaattaggccgggcgcggtggctcttgcctgtaatcccagcactttgggaggctgaggcgggcggatcatgaggtcaggagatcgagaccatcctggctaacacggtgaaaccccgtctctactaaaaatacaaaaaattagccgggcacggtggcgggtgcctgtagtcccagctactcgggaggctgaggcaggagaatggcgtgaacccgggggggtggagcttacagtgagccgagattgccccactgcactgcagcctgggggacagagtgagactctgtctcagaaaaaaaaaaaaaaaaagaaggataagaggcctcagtgagatggggcagcgaggacctgcccttcctgggggggaacagcctgtgtgaaggcccagaggcgtgaggtagcagaacctgcccattcagtggttttcagacctgaacgtgcagcaggacccccgggggcctcattgaagcccagattcccgctccctcccatatccagaagccccccacattggcaggccctcattcagagaagctggggttgcagaatttgcacttctcacaagttctcgggtcacactgatgctcttggcccggggccctcactccgagaaccacagactcaggggctttgtgagatgaagacaccggccaaccctcgaccccaaggagcaggcaaggggtgggggccagagccggacaaccccagagccctcacttaccctctgggttctctaggagaattcccttgaaactccggtccttgatttccccatctggaaagcgggtgcttgataagtttcctggtttcctgtggctggtgaaggcacgaaccaagacgacacaggtagggtggttaatgcagagcctggcccacagcaagtgtttaataaatgtaagcagtgactgtgagcgctgatgaaggctgtgtatgggattgatgaaggggcaagaggccttcaccaggctggtggccggtgaaaatgcagaaactggatgggcgtggtggctcacacctgctacatgagcactttgggaggccatggcaggagaatcacttgagcccaggagtttgagaccagcctgggtaacatacccagatcccccatctctacaaaaaataaaaacttgccggctgcagtggctcacgcttgtaatcccagcactttggtaggatgaggcgggcggattacttgatgccaggagttcgagaccagcctggccaacgtggtgaaatcctgtctctactaaaaatacaaaagctagttgggcatggtggcacgcacctgtaatcccagctactctggaggctgaggcatgaaaattgctggaacccaggaggtggaagttgcagtgagccgagatcgtgccactgcactccagactgggtgtcagagcaagactgtgtctcagaaacaaaaacaaaaacaaaggcgggcgcggtggctcacacctgtaatcccagaactttgggaggcagaggcgggcagatcacaaggtcaggagattgagaccatcctggctaacacggtgaaaccccgtctctactaaaaatataaaaacttagccaggcagggtggtgggtgcctgtagtcccagctacttgggaggctgaggcaggagaatggcgggaacctgggaggcagagcttgcagtgagctgagatcacaccactgcactccagcctgggcgacagagcgagactctatctcaaaaaaacaaaacaaaacaaacaaaaaacagttagccaggtatggtggtatatgcctgggaagtttgcttgagcccaggatgtcaagtccgcagtgagctatgatggcattgttgcactccaggctgggtgacagagcaagatcctgtctctaaataaataatgcagaaaccaagggcatggcacccatgaatgtgctagctgcagctgcgtaacaaatcactccaagtttaccagcttacagcaacacgcaggcactgtctcccggcttccgtggctcaggagtggcttgactgggtcctctttccaccttctcccacggtgccgatcaaggtgctggctgcgttgagctccttcctgaagttgaaagtccttgaccaaactcctgtggttgtcagaggaatgcgagtccttgaggttgtgggactgaagtccctgatttgttttattttggtagagaaggggtctcactatgttgcccaggctggtgtcaaactcctgggctcaagtgatcctcccacctcaaccttgttttcttcctgactgtcagagttcacccacccaccgttccctgcctggcctcttccagggaccaggagagaaggttctcagtttgctaaatggaggctttttttattttgagacagagtctcactctgttgccctggctggagtgcaatggtgcgatcatagctcacgacagcgattctcctgcctcagcttcttgaatcactgggatgacaggtgtgtgagccactgtgcccaactccagagtggagtcttatacaacacaagttatcgtggtggtgacacctaacacctttgccctattctgttggctacacggaagtcacaagcccaggcctcacttaaggggaagggatttgcaggatgaaacaccagagggctgagaccatggggccactttcttttttttttttttgagacggagtctcgctctgtcgcccaggctggagtgcagtggcgcgatctcggctcactgcaagctctgcctcccgggttcacgccattctcctgcctcagcctcccgagtagctaggactacaggcgcccgccaccatgcccggctaattttttttttgtatttttggtagagacggggtttcaccgtgttagccaggatggtctcgatctcctgacctcgtgatctgcctgccttggcctcccaaagtgctaggattacaggcgtgagccaccgcgcccggccactggggccactttctatcaaccacacctggctcgggcatgcacctgccctcccccatgcatacaggcccacatccatgccttcaaatggccacaaaagtgtgcgtggccatagacatacatacttgcaagtgtttctctttttgtgttttgttttttgttttttttgagacggagtcttgctctgtcacccaggctggagtgcaatggcacaatcgcagctcactgcaacctccgcctcctgggttcaactgattctcctgcctcagcctcctgagtagctgggattacaggtgcgtgccaccacacctggctaatttttgtatttttagtagagacagggtttcaccatgttggtcaggctggtctcaaacccctgacctcgtgatcctcccgcctcagcctcccaaagtgctgggatgacaggcatgagccaccatacccggccagtgtttctctttttgcattgcccactgggaagctcagagacaaaattatggcctgtgtgtagcaaaggttcagaaccacctattgtgacttctcttccagcgacatctctcgaccttggttgtaattcattttctctggctgccttgtctgtttgcaattctttcctccccagtctttctgggcccatagaggctgacaatggcagcggcttctgtctgctcagcatctgagtgcagttctaaggaccttataagaattttctcattttatgctttcaagaaatctcctcctacagaggagggatctgccacacagagaggtcgtgagagccaccccaaggacaccagctgggagatgggagagctgggatgagaacctggactcaatccccagcgggcagatttttttttctttttagacggagtctcgctctgtcgccaggctggagtgcagtggtgcaatctcggctgactgcaacctccaactccctgcttcaagtgattctcctgcctcagcctcatgagtagctgggattacaggcatgtgccaccacacccagctaatttttgtatttttagtagagatggggtttcaccacgttggccaggatggtctcaaactcctgaccttgtgatccaccagcgggcagatttgagagctgggctacacactgacatgctttacatgcagagtgaccaagccaggagaatccaccagcaggggactgtggcgtcgcaaccccctccctggggtcgcaacctcctccccggggtctcagcccaagctttgaatgtgggctgccactggcataaataatcgtttataggccgggcacggtggctcacgcctgtcatcccaacactttgggaggccgaggcgggtgcatcacgaggtcaggagttcaagaccagcctggccaagatggtgaaaccccatctctactaaaaatacaacaattagccgggtgtggtggcggacgcctgtaatcccagctactcgggaggctgaggcaggagaatcacttgaacccaggaagtggaggtttcagtgagccaagattgcatcactgcactccagcctgggcaacggagcaagactccgtctcaaaaaaaaaaaaaaaatcgtttacaaatgtgttccaccacacattgatcccccacgagagaaagtgctgcttcagggaattctccctcgagtggcgtccccaggccggcccagctgcacccaacgaagtccacacgccaggcctgtccaggagccccttttggccactggacaagggtctggctgggccctacagccctcccagatctgatcccccaacaaagggaagaccaggatccagcgccacggtgccttcatgagctagacaggccctgagtcccgtgctccggattccactgaacagaactctcgtgcacgtttccccacggcgtgccccccagccggagccgggtgatggggacatcatcacaaactctgtgccctccaagggctcccaggcttggagagggagacaacagaaaaaggagcccgccatgctggcagcagggggcacacagtaggtccgcagcaggggaacaggaggacggattttacaggaccgggcaggggcacagtagggccctgttggccataccgacctctgactcctagttccccgccgaagccacctctttgcagctttgtgcccggggtcctccttgcacacctgggttttcctcgggccgccctccgggtagaacagctgacgtggatgagcgctgaccacgtaccagggcccgggccaagcatgcgacttacatctattcaataagtcaacgtggtccccattttacagatggagaaactgaggcacggcgagtgacttgagctgcccagggcccgtcagcaggggaaggggtgccagctgaactcgggagctctggcctgtcccgtggtgagccccacggcctgagtccacatcccagttctgccctttttaaggttcagggagctgcggcctcagtttgctcactcacaaaatgggaacgagtgtccggaagggatggaagggcacatgaacagaggcccccattctgaccattcttttttttttttttttttgagacggagtcttgctctgtcacccaggctggagggcagtggcgcgatctcggctcactgcaagctccgcctctcgggttcacgccattctcctgcctcagcctcccgagtagctgggactacaggtgcccgccaccatacccggctaattgttgtatttttagtagagacggggtttcaccatgttggccaggctggtctcaaactcctgacctcaggtgatccgcccacctcagcctcccaaagtgctgggattacaggtgtcagccactgcaccccgcctgacgattcttaaagaagcaaaatccaggcccccaccccagcccggccccacaccagctggctcccaggaggcctgggctctgcctcgagcaccccattcactcctctcctgcagccccagcatttctacccattgagaggaatcaaaaaacagccccagccccaggaaggtggaaggaacagaaaaccagggctggtgcccacagggaaactggaacaaacccataaaactgaggctggtgaaccccaggccacctaactccaactgcacgggagccccggtaccatctccccagaatccgcccctcaggcctcagtttgctcacctgtgaagtggggcctgcaccgcccagctcaagggactatgagggaatctgcgcagatggggacaaagcagcctcccttcgctttgtgcaaacctctcctccttgccccggcctcctcctggcctccagagcagagctggcccccgactccagctcccccaggatcgatgggaggatcaattccagcagcagcaccgggctgtggggggaggggggctcctctgggaagcctccagttcccctcctccctccccctcctttcctcccccctccccttcctcccctttctcaccctcctcccatctcccctctgcttcctccccctcctcctcttcctccccctcctccccatcccttcttcctcatccttttccctcacctccccctccctcctcctcttcccccctccagcttctgtcctctgagcctggcccaggattccttgcccctcccccaccggtccaccctggctgtttatggggtgggcagaggctggtggccgcccttgtcacagcctttcctgagcactgtcagatgtcctcaagggtgcactgtgtgtgttttatccccattccacagatggggaaactgaggctccagaagggtccctgatgtgggaaatgaaggcggggctgggatttgagtctggaacccaccctcaaccccaaaggggagaagccccggacaccacgcaggcgctttgggaatgaggcacccttggcggatggactgggcgggctggggtcagaggtcacctgccctgcccagcagccgcatggagatcacccagtagccctcaggagtcggggctcccacttgtgaaccgggtacgccacccctggagatgcagagctggctggacacgcacctacctccatcttctattcccctctgagagctgggggcgggtggttctttggtttttctccagggaatgagaggcgccctctctggggggtaagagccttggatctgcctgtttcctcatcggtaaaagcaaggggtcaacaggatgaccccatccctccccaatccccttctcttcttgccggcgctatgacccctggggagcccctgcccccaggcctggcagcccccagggaccctcctactggggcctgccacggtggggggacaatgtttcccattttctgcggagccccccaactctcacctccaggcagaggtgaggtgatgaggggctggaggaggctccccctccaattccatccttgggaaatgccaccctctcacctcctggcgcccagggagttcagtaataacagaaacgttttgtttggttttgcttaaagcgagcaggagggagagcgcgaagccaacggctcctgcccagcccaattgtggggatttaccatggaggcgattactgagcggaactgcgggcggctctgctcggagggtcccgtgcttgttagggaggtgggagaaacagcaattacagctgttagcaccgaggggaggggaggagggggaaggagaaacggaggaagcagaggagaggggagcagggagaaggaagaaggaagagtggatgggggagggagaggaggctggaagggaggaggggagggctggaaggagaagggggagtagaaggaaggaaagggaggagccaggagggagactaggaatgggaggaggggggaagagggagaggaggagggggaaggaggggggaagggggaaggaaagtagaggagggggtaggaggagtgggaagaatggggaaggatggggaggagggagaagggggagtagaagggggaaggatggggagggaggggagaggaggagtgggaagaatggggaaggatggggaggaggggcaggaagggggaggagggagaggaggaggaggatggaggaggagtggggaggaagagggagggtgaggaggagggagaggaggaaggaaatggaggaggagtggggaggaagggggaggatgggggaggagggagaggaggagggagatggaggaggagggggaggaagggggaggatggggaggagggagaggaggaggaggatggaggaggagggggaggacgaggtaggaggatcctcacccttcaagagcatcaagttttcctccccagtgggagaagctgaggcccagagagaagtctctgctctgacaccccacaagagctttcccaaccaacaggcccctctgggactccctctatgccctgcccagggccccacagggctcgctctgcttcctgctctcttgctgcaggcctggagctgggaggtgggcaggtgatggccagagcaggaggcggctggccccttcccctgtccgctgcctcaaatgattaaccagtgcggctggagtgaggagtggacactgggagccggttcctcaaataccctccacacctttgaccggcgcatgggccagaacgggggacccctccagctcaggctgaagagctcccccaactgccgggtccagagggtcctgcgctccctgggatcgcccgaagggctgggtcggagggggaccctggcgcagggaacgttctctgtaactgagatccgcgtttctactcaggagctcagctgagactctctgcgtggccaaccctctccagagaccggctccaccgccagccagattggatgctgagcgtgtccacacagcacgcactcactgggactcagcgtgctgggactcagctccccgccgcccagtccctcgggcctaggtcagctcgccagctggtggcctgaggcagatctcaggacctccctgtgcctcagtttcctcacctgaaaaatgggaataattggagttgcttcctcagagtacccctgcccctagctccctgcaggtacagtggggatggggcaggagatagagcggggacctgcaggacgtacccctcccccagggaatgggggacgccaccccacccctggcgagcccggaaggtggctgctgattgaacaatgggagaaacaagctttcttctagcgcaaggtgactcacctgctggcccagggacaaagctcccccagccactccccaccgcccgccaccccccaccgcccgccacacacacacacacacacacatacacacacacacaccgcacagcacggagagggggtgagtcattccaccccaccacatctgtgatggcctccctgggtgcgtactaacctgtggggtggggggattatactaagggccgcccgggaccctccctgcttggcctcacagccagggagagaaggcccaaccacccccagcctggcattcaaggcctggctttgaacacatgccccccccccacacaccccagcttcattcagttttatctcattgactcattcaacaaacattccctaatgaagtcctgtgagggccccgaaactgggctaacgccagacgcctccccagccccaccgcctcttcctcagatgacaaggagtcttttcgtccttccattggcctacctgacttggactcctacacatcctacaaaacccaacctcagggctcctcctccaggaagggaggactgccgcctccccagttctgatctcagggggatggggatgacttttcccctccctaagtatgggagccccagcgggagggacagaggctgtggccgcagctctagggtggtgggggcaggggagcaggagtgatctgagaagtttgctaaatccagcgaatggcctggttcccctcccccatccccggtctgcagattctgcctaaggaggtgcgaatcccttcccctttccccattccccattccccagtccaacaccccctccccacccagaggtccacgaggcgagacagacccaaagagagaggcaaggacgtgggcgttggtcggtcttgcggggaggaggtgccgtgctctccccacttcctgacccagcagaaagcgcccgggcgtgtccagataaaccgcgccttaatcgaggcgccattccggcccggaacaggccaggcccaggtgaggctcagagccagatgcgcccagcctaacccacctggggacgcccctcggaccctcccggggcggggtcctcactcccgaccaggacctctgtctctgcatctgcgaagtgggcgcccccaggcctgtgctccccccacccacctgtcgtctcgtctcggctttcagggtgcagagtggacactcccaggtgtccaagccggcgagctcgggtcccgcagaaccggcggccctggagacgccccgagggcagccccgctgcagccttgctcgggtcccctagcccggcgcctccgcaaaccaacccaccgcgggccgccgagccccgctccgggatccgccggctgcctccatcccagaagagtgcgcagagaattaaatctagatatttacatgtttaatggctaaaggagcctgtcttctggcagggcagggagggcgctcaggtggtttaactcagcgccgggatcccgctcagctgcgggggccgcgaaccccgccgctgggccgacgattgggcccctccggagcgcggcgcccaacgcgggtttcgttgcgtcggggaagtccgtggcctgcagcgtccagtccccaggctgtcagccgagccctggagtggggcgttctccaggcccccaacccctgatccaggccgttcccctcccgcgcaccctccggcgggggctgcagcccgcgcccctcgccgccaagccccattttcccacagtgcaaactgcagcaaacgaactggttttctcctgagcgcacgctgcggggagacgattccaacggcgtccagtgaggaggggcccaggcctgcgagacggggcgcgttcctgtccccagacccctccggctgcgcctcaacccccagcccggctctctgacctgcatcggtcgggccgggcacagaggaggcaaagcaggcggaggccgcgagaggagagcagcctgacctcccgcctgagcccggacccttcccctcgggcaccctcggacgcccccgccccagcgtgttactttctagatggggaaactgaggcgcggccagggcgatgcggcggaagtcccgcgcccggccgtctcccgcgcctgccagacagagccccgagaagagggcatagaattccctcctctaattgtgtcccagaactctgggacgacggaggccaagctgctgagggaggggacgaggacgcggggccccagggaccaacccctccgctccccggccagccgcggccgcccagcctcggtgccccggcgcaaacaagcgcggtgtttgccgagcgcgaggcgggcggcgcggcccgagagcgatgaggattcgatggagccgctcgccgcggcgggggcaacggagcccgggcgggcgcggggatcgatcgggcacagctgtcgcctaagagcccgcgggagcatccacccgcgggccagagctgcccgggcgccccgcaactgcgggcaggaaatccgggacgtcgggcccgccaggggcgaaaccccaaagtcgcgacacccggggtggggaggtcaggacgtccccacggccaacgtggaaccttcgggagccgcgcgctcagcctcgccgggacccccgccaggccgtaaaagcccagagtctccccccaaatctaaataaaatccccagaccccgcccgaacgaaggcggctggagtccagagggagaactcctgccacacactaggcaccggcggccgggatttggggcgcccgcaggtttcgggggccgggagtgggagcagagcggatctagggctgcggctgggcttgggtggggcgcgcattcattgccatcgtttagtaaaacctcgctttaataaaagcagggaggggtgcgcagagcccggacactttcatttcggtgggagacaaatcgaatcagaaagtcagttgggggcgcactgtgcagggttctgggggagccccaggaaaggaaaacttgaggtatctgactctgcctttgatatttttagctgcaatgggagagtcaataacaacagggaaggtggtgtgtccaaaaatgggggaggtgtggaggattaaagagggggttcaagctt

SEQ ID NO: 2 - DNA, 191684 bp, Homo sapiens
gaattccagggccagaagggactccaggttgagtgggaagcccagccacccagcctggccccctctccacctccctgacggaccctctaacaaccgaactggccgctcccctccctgcccaccaccaccctccagggctcccgacgcccctgcccatccccccgcccctcccccactccaagcgctcccagcctccccctcccccggccgtgtctgtaccccgcccccctgctctccgcgggggcccgggaggagaggaggcggctccgtgctgcggggtgccggggcgcagagcccgcggcgggagctgtcagcgccgatcgtggggagggggctcctctgccccaggtcgatgggagcgggggcccaggctgcggtttacactgaatccacaaaaatcaccgaagcttgaaaagtgctcaataagccatcgatcgctctctgctgatcggtgccgccgccgcagcggggctggggggaaaggcggggcgagcagacccaggctccctgcctgtgccccacgcgggaccgcggccctgcatctgccccccacccacgcgaggctgcagccccagggcctgggcaagaggttcccatcccgcctgcaggcccgggctgcaggcctgaccacgctgaggggtggggagggagggggttagaaagaacgccccctcctctgtcctcccaaagctctctgtggccctgggactgcaaaattcttccccaggccgggcgcggtggctcacgcctgtcatccctgcactttgggaggccgacgagggtggatcgcctgaagtcaggagttccacaccagcctggccaacatggtgaaaccccggctctactaaaaatacaaaaattagcctggcgtggtggtgtgcacctgtaatcccaactactcgggaggcggaggcaggagaatcccttgaacctgggaggcagaggttgcagtgagccaagatggagatactgcactccagcctgggcaacagagcgaaactccgcctaaaaaaaaaaaatccttccccagatacttccagagatatggaattaagacaaatcctggctcattcactgtgactgctgtgtgaccttgagtgtgtttcttaacctctctgtgcctccattgccatatctgtaagatggatatggcagcacgcaccctgcctgcaattcatggcttccttagggtctcacttgtgaatctcctctggccttttggcaacttctttccttctcagctggggaagccgttttcctgcctgaaaaacctcttccccagtgcaaggcttggaggctggacacagttcggggcattcagggaactgccagcaccagtggccatgtattcgggaggaggtgagtgggaagaggtgaggccatggggtgggcagccacttgccaggggcagtgtttgttcttaattctggaggtagcagggagccatggaggatctagagcagaggtgtgacctgaatcaaatcgctccttccccagagctgagcctctgtcctgggttggcctctgtgctgatctcacctcctcttcctctccccccatggcccactggtcaccactcctggcccttctccctctgaagtctctcccattgaccccacactggctctctagggacctcccaaggccagatctgaactcggccctccctcactctaagccctcccaaagctccctgtggccaacccaagcccttggcccagtgctctacccccactctatgaacgagctgttccactgcaagtccagccacgcgccgcccagcccgccaggcccacctcccaccgcagcaccccctggctgttgtcacactcgcccgcatcccacccagcctttgcccagcagttcctctggactggaggtcgttccccaccctgcatgctggcgaaagcactcctcatccttcaagcctcttttccaggagccctcccaggcagcatctcccagagacagccccagcccgaggcctcctccgagccctgtctgcgtcttctcttgcagcccaggctgggggtgccttctggctgggggcaccttctgcctgttttgtagaaggcggaagaacgaggtattggtagcaggggctggggttggaggagcccaagagacacaaagccagaaccttcctccaactgcctggaaatctgaggccccactggtagatcttgcctcccacagctccctctggcctttcagcacagcccccaactgacacccagaaggacccccccacaccaggtcccaaggggagagagagaagagaaaaaaacagagagaaaaggcaagtgggatcagggcctccctccactacccgtttcacaagacccccccttctttctggaggcccccactctgagagtctcagctcccccacccgagccccccatctgatctgtgcaggctcaggggccgcccccactccctccctcaccctctccccaaaggtcagggagcaaatttcatccccacgtgtctctcacacctcgatgattaataattgaagaaaacgtatttctttgggggcccaggatacatcagaaataactacagaattcatatgctgccagaggcacgacacccatgggaagacagagccaggagaggggcacgggcttctgagggcccagaagctgacggcgctgcagaatgatttcaaaaccaccctaatagaatcacccatggaggacgttctcagcactgggaaggcaccgtgctgaggctttggaagccaatgacctcaccagctccattttacagatagggaaaccgaggcacagaccagggaagtgacttgctcgtggtcacacagtgggattcaagcaaagaccgtcccccacacccctttaacctgtcctcccgtcaccagtgccacacttcctgcacccaggatggcacaagggcatagaggccgggggcatggggaagctctcggtcctgcaccctgacagcctgtggcctgctcatcacagacgcgtcatccccactcacccagcatgtcttgaaattttttttttttgagacggagtctcgctctgttgcccaggctggagtatagtggcgcgatctcagctcactgcaacctccacctcctgggttcaagcaattctcctgcctcagcctcctgaatagctgggactacaggcatccgccaccaagcccggctaatttttgtatttttagtagagacggggtttcaccacgttggccaggctggtctcagactcctgacctcaggtgatccacccgccttggcctccccaagtgctgggattacaggcgtgagccaccatgcccagtcatgtcctgaaaatcttgaggcatctaagttccgatgccttgcccaggctcgtttaatcctcacaaccacccctgctcacacaggagaagaccaaagctcagagaggtgaagccacctgcctggggtcccatgacacagggaggcaaattcaggtgtgtccttcttatgagtctgtcttatgagtcctggcattgcccctctcattggcatctttttttttttgagacagagtcttgctctgttgcctagtctggagagctctgcagcctctgcctctcgggttcaagtgattctcctgcctcaggctcctgagtagctgggattacaggtatccaccaccatgccgggctaattttttttttttttttgtatttttagtagagatggggttttgccatgttggccaagctggtctcgaactcctgatctcaagtgatccgcccgccttagcctcccaaagggctgggattacaggtgtgaaccaccatgcctggccccattggcatcttgaggctcagccccatgtgaggtgggacgggtgatgcttgaccccatatggggcctgccccaggatctacttgatggaaattgaagatgtcagaagacactgaggtgcatccaggttcagagatgtagctgctgcactagccaatgggtggaggtgcccaagcgtccatcaccagaaggatggatccacacaactcagccacaaaaaggaatgaggctctgacccaggccacagcatggatgaagcttgaggacatcacactcagtgagagatgccagacacagaaggacaaatcctgtgtcactccacgcatgaaagtgccctagagtcatcagatccagagatagaaagtaacatgggggctgggcatggtggctcatgtctgtaatcccagtgctttgggaggctaagttgggaggatggcttgaacccaggggtttgagatcggcctaggcaacgtggcgagagcctgtctctacggaacatacaaaaattagccgaacgtggtggcacctgtaatcctagcactttggaaggctgaggcaggagcatggcttgaacccgggaggcagaggttgcagtgagccaagatcgtgccactgcactccagcctgggcaacaaagtgagactctgtctcagaaaaaaaaaaaaaaaaaagcttgagatgggaaactttatttatatatgttttaacaccgtttaaaaaattttgggccaggcgtggtggctctcgtctgtaatccccgcactctggggggccgagatgggtggatcacctgaggtcaggagtttgagaccagcctgaccaacatggtgaaatcccatctctactaaaagtacaaaaattagcctggcgtggtggcgtgcgcctgtaatctaagctactcaggaggctgaggcaggagaattgcttgaacctgggaaacggaggttgcagtgagctgagattgtgccactgcactccagcctatgtgacacagcaagactttgtctcaagaaataaaataaaataaaataaaacaaaatttttcagaaagggatgaagttctgacccagaccacagcatagatgcaccttgaggacgtcacgctcagtgagagacgccagacacaaaaggacacacagtgtgtgatcctgtttctatgaaatgcccaggaaaggcccatccacagagacaggaggggatggaggggtcagaaattctagatgctttttcattcaggtgtacgtgctgggggggcctttattattcacgtgcccatcctccgcttatttcaatgtgttacccttgcccgatgctgctcttctgctgtgttccggaacaaaacgtactgggcatagctttgctacccaagcgaaggggactgagaaacagcggtggcctcctccttgggtggaatgctgggtggtcatcaaaggtgatgggggaggagacatttaaatgacacgggaagatgcccgtgagataacaggaaagacacagaccacatgagagtcagaggtcaggtgagcccattttggtaaaacccctgtctgttgtttttttaagagaccgggttggccgggcgcagtggcttacgcctggaatcccagcacttcgggaggccgaggcgagtggatcacctgaggccaggagttcgagaccagcctgatcaacacggtgaaaccccgtctctacaaaaaatacaaaagtagccaggcgtggtggcgcatgcctgtaatcccagctactcgggaggctgaggcaggaggattgcttgaacccaggagacggaggttgcagtgagccaagatggtgccattgtactgcagcctgggcaacaagagcaaagccctgtctcaaaaaaaaaaaaaaaaaaaaaagagagagagagagagagagggtcttgctctgtcacccaggctggagtgcagtgatgcaatcatagttcactgaagcctccaactcctgggctcaagagatcctcctgcctcagccttccaaagtaatgggaccatggccaggcaggtagctcatgcctgtaatcccaacactttgagaggccgaggtgggcggatcacctgaggtcaggagttcaagaccagcctgaccaacatggtgaaaccccatctctactaaaaatacaaaattaaccaggtgtggtggtgcatgcctacaatcccagctacttgggaggctgaggcaggagaattgcttgaatccagtaggtggaggttgcagtgagccaagatggtgccattgtactccagcctgggcaacaagagcgaaactccatctcaaaaaaaaaaaaaaaagaaaagaaagaaagaaaagaaaaagtaatgggaccacaggaactcaccactctggctatttttctaatttttatttttgtagagatgagatctcgccatgttgctcaggttggtcgcaaactcctggcctcaagtgatcctccgacctcagcctcccaaagtgctgtttttataggcaagagcgatggcgcccggcctcctagagctttaggagggagtatggccctgcccacaccttgatttcaaatttcaggcctctagactgtagaaaaatacatctgtggggttttttgttttgtttttagagacagggtctcattctgtcacccaggctggagtgcagtggtgcgatatcagctcactgcagccttgacctcctgggctcaagtgaccctcctacctcagcctcccaaataattgggacaaaaggcaccaccacacctggctaatttttgtatttttttgtagagatcggagtctcgctatgttgcccaggctggtctccaactcctggcctcaaataatcctcctgcttcagcctcccaaatcattgggaccaaaggcaccaccacgcctggcaaatttttgtagatatgggtggggtgggtctcgctatgttgtccggactggtctcttaactccaggcctcaagcgatcctcccgcctcggactcccacagcgctgggatcacagcctccccccgccccgaggtagcgggtggtgggaacgggattggaatcccgactgtggggcccctgcggccacctccaggatacagcggaccccgatgaagccctggcctgggtgctgggggaggctccgcggcgcggtcccgcaggcgggaggcgatgctgccgacgctattgctgccattactattacggagagatggggcggggcgggagcaccgggcccttcccggaagcccttcctgagcttattcagtgcctggggccgcggcgatcgatgacagctgggcgccggccgagccccctccgggccgcgcgggggcgcatgcgcggggccgcgggatcgatcggccgcgctcgggcctccccgcacccgcccgaccccgcccccccggctcgttgcccggcaacctctgcccggcgcgctcccattggctggcggcggcccgggccccggccgcgcgtggtcacttggtcagcgcgggctcggcgtggccgggggcctggctccgggcgcgggtcgatgccgcctcgcatctgacctttcccggcgcggggagggggcccgagaggatggagagagctggaccatcttggaagaaaactttattgacccgtctcttatcttggggacgcacggttccagcggcggggggcgagggtacggctgggtgggggcaggggcggccaggaccttcctcccggacatgcacggaccccctgaccgccgccccggccatctccctgggcgggctgctctccattccctagacaggaaaattgaggctcacgagggcccggggattacccaaggcgcaaagggtttatgaggtgcaaggggcctggagcccagagagtgtggctcgagggcttcagactctctctgccacgccgtgctgacatctgcaccctccaagcaaagctaaaacatcttcccgcgttgctgggtcccacaccgtcgcagcctggaacccaccaccccataaggagggaccgttccttaaattgaaatgcgatgttgaacagccacgaaaaaggacgaaatcgtgtcctttacagcaacatacgtgcagctggaggccattatcctaagcgaatgaaagcagaaacagaaaaccaagtacccatgttctcgcttatcagtggaggctaaacattgggtactcatggacacgaggatgggaataatagaccctgaggacttctaaatcggggaaggtgggggacaggggctgagaaactcctgggtaccatgcttagcacctggatgacgacgggatcggtcatatcccaaacctcagcatcacaccatatacccatggaacaaacccgcatatgtactcctgaatctaaaattaaaaagatgaaatttcaaaatagtaataggaaggggccaggcgcggtggctcacgcctgtaatcccagcactttgggaggtcaaggcagtggattccttgaggtcaggagttccagaccagcctggccgacttggagaaaccccgtctctactaaaagtacaaaaattagccgggcatggtggtgaatgcctgtagtcccagctactcgggaggctgaggcaggagaatcgcttgaacccagcagacggaggttgcagtgagctgagatcgcaccactgcactcctgcctgagcgacagagcaagactctgcctacaaaaattaattaaaaataataataataggccaggtgtggtgtggctcacgcctgtaatcccagcactttgggagaccgagacaggagtatcgcttgagcctagcagttccagactagcctggacaacagagcgagaccccatctctaaaaaataatatatatatttttttgagatggagtttagctttgtcgcccaggctggagtgcagtggtgcgatcttggctcactgcaacctccacctcctgggttcaagcaattatcctgcctcagcctcccaagtagctgggactacaggcacgcaccaccatgtcccactaatttttgtatttttagtagagacggagtttggccatattggccaggctggtctcaaactcctggcctcaagtgatcctccaacctcagcctcccaaagtgctgggattacaggcgtgagccactgcgcccagcctaaaaaataataataatttaaaaataataaatgcaatgttgaaattaaaaggcttaggaacagtgtgagatcttcatgtccaaacgaaactcccattacacagaggccctgtgaggggaagccccaagtcaaggtcacagacttgagaaaagcttatggttattttgaaggggatatgggtagtgccctaaacattccaatttagtaaaaaaaaaaaaaaaaaaaatcgcaaatcccccaacaaccacttgggctcattcaaatgaacacctggactttgtcaaaagaagagttattgtcagaataaagacgctgcttataaaatgctagggttccctgtgtggagccaagaagatttcttctttctttaagggtgaaaaacaagattggcttatttgacagatctgtgcatttttttttttttgagacggagtctcgttctgttgtccagactagtgtgcagtggtgtgatctctgctcactgcaacctccacctcccgtgtacaagcgattctcctgcctcaacctcctaagtagctgggattacgggcacatgccaccacacctggctaatttctgtatttttagtagagacagggttttgccatgttagtcagtatggtctcgaactcctgacctcatgatccgctcactttggcctcccaaagtgctgggattacaggcatgagccaccgcgcctggccgtaaatgttttaatatttagcacgcatgatgcttttgatatacgtgccatgccaagtccagggctcagagatttgtttaaaggtctccattaatcccacatgtaccccaaatcgctgtggttttagaaaagaaaaccttctgtgcaactccgtaaccaccttaaaggaaatacaaaaggagaaaatcgctggccgtagccttctccaccccctaaactcagccctggccactttgctcaggcctcccagcttctgtgtcctgcacgtaagcctcggtcttcacacagtccctgatatctgcatttatttcatatttttcccataacgttccacctgacatctccatctccttcctctgccgctgcgtttctaattcctaacagctgaggaaggttgcattgaccggcggattgtgtggggtgatttttgaaagcagatcctggaattcaatttttattttaacctggttattgagtggggagggagagggaggcggaggttggccgattcgtgtgcaagatgaaaaagctggattttcacaaaggttgtgctgtttggaaatggctggttaggttttcaacgtaggaatggttcaacgacagccctacgagagtgtgcgcgagcgtgcgtggctccgtgtggtttcgtgtgtgtgtgtgtgtaagtgagctgcagggtgtgtggacaagtgtgttgtgtgaatgtgcatgtgtgggttcgtgtgtgctcctgtgtgttcccgtgtgtgcatgttgtgttcctgcatgtacatgtgtggcttcgtgtgtgtgcgtgtgtggttttgtgtgtgtgcatgtgtgtgcgcctgtgcgtgttcgtgtgtgtttgtgtgtgtgcatgcgtgtgagagggtgcactcagcggctgtgcctttgtacacgtgtgaatgtgggtgtgagtgtgtaagtgctttgtgtgagcatgtggggggaaggacgcagaggcacgccagcgtctgactgtgtgtattgttaagagtgttgtggggtacacgtgtgtatgtgagctcgtgagggtgtgcaagggatacacgcgtgttgtgtgtatatgtgtatgtgcatgtgtgtgtgcaggtgtgtacatattagtatgtgcagatcagtgcatacctacgtgtgtgttcctgtgtgcagatgtgcggccatttgagggtggcagtgcgcctgtgtgagtaggtacctaggacagcgtgcctgtgcatttgtatgtgagtgtgtgtgctgtttttgcacgcatgcaccggtgtgagggtgtgtgtgtatcggtgcacatctatgagcatgtcagtgtgtgtgagtggcagaaggtacacgggtgtgtacgtgcgtgtgtatacctgttcgtgtacctggcagtgtgtgggcatgtgcgggtgtgagggtgtgtgtgccggtgcacaccagtgtctgcacctgcgaccaccccgaccccgtgcccagccccctgaccctctcctgctgttctcactgcggggaaacgggtccaaccccaccactgaccccagctcatctcaggcctcccgtccacagccacttcctcaggagccctcctggacccgccagcccgggtctgaccccggtatcagcccgaggggcctcgtcttgaacggaggagccgctggttccactcatgcatttatttcataaatgttggcctcccgggagctccataatggcagaggcctgtccgccttgagcaggggtccctccccagagcctgggattaaagaagagaacccagtggtcctaggtgcgccgtgagaacatcaaacatcggccagggctgcacacgggaggccctcgggggtgcagcgtggaagccccctggacagatggagaagctgaggccctgtcaacaggtcccccgcgtcctccccggccctgtgttgatgggcggcagctgtgtccaggcacgctgtccccgttggacatggccggacgcatggatttccgaagccatctctccatctggcagctttattaacccaattccagggatcgagtgattgacgtgtttgcttatcggctcctcctgtctctccagggacgggtgcccaggtgcccccaccccacctccatcggcccagggggagaggggacaccagatcccccccacagccccgagaccaacgcgcgcacgcacacacacacacacactcacagtgactcccgctcaggggctcttggtggctggatcaattcaagtggatctttggagaacatgatgggccaatgtctaacaaaatttaaaatgtgaactcaggccaggagtggtggctcacgcctgtaatcccagcattttgggaggccgaggcgggcagatcacccgaggtcaggagttcgagaccagcctggccaacatggtgaaaccccgtctctactaaaaatacaaaaattagccgggtgtggtggtgggtgcctgtaatccaagctactcgggaggctgaggcaggaggatcccttgaaactgggaggcagaggttgcagtgagctgagatctcgccacttcactccagcctgggcaacaagagaaaaactccatctcaaaagaaagaaaaaaagaaaaaaaaattagccaggtgtggtggtgagcacctgtggtcccagctatggaggaggctgaggtgggaggattgcttgactctgggaggttgaggctgcagtgtgctgacactgcgtcactgcactccagcctgggagacagagcaagaccctgtctcaaaaaaaaaaaaaaaaaaaaagccagacacggtggctcacacctgtaaatcccagcagtgtgggaggctgaggcaggtggttcacctgaggtcaggagtttgatactagcctggccaacatggtgaaaccccatgtctactaaaaatattttaaaaattagctgggtgtggtggcaggcacctgtaatcccagctactcaggaggctcagacaggagaatcgcttgaacccaggagacgggggttgcagtgagccgacatcacaccattgcactccagcctgggcaacaaacgtgaaactctgtctaaaaaaaaaaaaagctgggtgcaattgctcatgcctgtaatcccagcactttgggaggctgaggtaggcagatcacaaggtcaggagtttgagaccagcctggccaacatagtgaaaccccatttctactaaaaatacaaaaattagccgggtgtggtggcgagcgcctgtaatcccagctacgtgggaggctgaggcaggagaattgcttgaacccgggaggcagaggttgcagtgagccgagattgtgccattacactccagctctgggtgacagagcaagactccgtctgaggaaaaacaaaaacaaaaacaaaaacaaaaacctttctagatatattcattgaaaaggctaggtgcccccaaatgagttggcaacttgtgtccacacaaaaccctgcacacgaaagcttatggcagctttattcatagctggccaaatcaggaagcaaccaagcttcccttgagcaggtgaacgtatcagtgggctgtggtgtattcagacagaggaggatcattcagtgctggaggaatggcatgtccagccttggaaaatatggaaaggagggtaggagtggggagggatgaaaaactacccaccgaagctgggcgcggtggctcacacctgtgatcccagcactttcggtggccaaggtgggaggatcacctgaggccaggagctccagaccagcctggccaacaaggtgaaagcccgtctctactaaaaatataaaaattagccgggcgtggtggcgggcgcctgtaatcccagctactcgggagtctgaggcaggagaatcgcttgaaccccagaggcggaggttgcagtgagccgagattgcaccactgcactccagcctgggtgacagagggacatttgtctttaaaaaaaaacaaaaaaaaaagctacatgctgaacagtgagtagagactggtcacattaagtcagagtatgtctctaagtatatacagatacttttttttttttttccccttgagacagagtcttgctctgtcacccaggctggagtgcagtggcgcgatctcggctcactgtaacctccgccttctgggttcaagcgattctcctgtctcagcctcccgagtagctgggattacaggtgtccaccaccacgcccggctaatttttgtatttttagtagagatggggtttcaccgtgttggcgaggctggtcttgaactcctgacctcagatgatccacctgccaggccctcccaaagtgcaaggattacaggcgtgagccaccgtgcccggccacggatactcttcatggtgtgtatcatgaggccctaggacagataatgaaggcttccacgtccaagggcacagggtggcacgggaagggttgaggtgggcatttatttttttgctgtttccatgtaagttttgtttctcccacgtatatatgtatattacttgctcaaaaacagattgcaaatgtgacaaaaattacagatacctattttgtagttcagcttttctgaggttcgcaggacaggggacgcccctcccacagcccagctcctctgcagatggctctgatctgacttccccagggacccagggcttttctcccgtgatccctgctcctggcctccagttcccgaaactcaccagctctgagcaggtaggaaaaagtggcttgtgtctacagagcccagttcttctataaagtgaaaacaggcagcatcgacaagcataaccgccgggcacggtggctcacgcctgtaatcccagcactttgggaggccgaggtgggtggatcacctaagatcaggagttcgagaccagcctgaccaacatggagaaaccccgtctctactaaaaatacaaaattagccaggcatgctggctcatgcctgtaatctcagctactcaggaggctgaggcaggagaatcgcttgaacctgggaggcggaggttgctgtgagctgagatcgtgtcatttgcactccagcctgggtaacaacagtgaaactccgtctcaaaaaaaaaaaaaaatccactccaggctggacatggtggagggcacctgtagtcccagctactcgggaggccgaggcaggaggatctcttgaacccaggaggtcgaggctgcagtgagccaattctcctgtctcagcctccctagtagctgggattacaggtgccctccaccactacactccaccctggacaacagagtgagaccctgcctcaaaaaacaaaaaaaacaaaacaaataaaaaaacaatgcagtcctaccccttgcctggctgcccctgactcttaagggaatgatgacacctccccgccaggcccacagacgctgccgacccagcccctcctcacctcaatgctctcctaacccccaagcctttgcctgcttttcctacttctcttcactgaatgaactcctgcacctcctacgcctttcggggcaacggtgcccttctcaactcaggctcccagacccgctgtcagccatggtttaaagtctgccactggccgggcacagtggctcatgcctgtaatcccagcactttgggaggtcaaggtggaggaccacttgaggccaggagttcaagaccagcccgggcaatataaaattcgctgagcatggcggtgcaagcctgtagtcccagctactcaggagctgagtggggaggatggcttgagcccaggagttcgaggctgcagtaagctatgattgcaccactgcactccagcctgggtaacagagcaagaccctgtctctaaaaaaataaagtcagccaccaccctcacactgtgagcctctcccatcaccacagggccttccatggccagctccaggcctggcatcagcgggtgcaggaaaagctcagtggagcgattccacatctagggctcggcttgtaaaattaaaataagtggagacccccccacaacccccagccacacgcaggcagtaggaacccgggagatgggacgagcgccgaagggttattagcagatgcctcgagccccctcgagccccgcagagtgggggaggatggcggaggcccttttaaggacccagtatcaccgtcctttctcggccagccgggcacccacccacctgagtgagcctggagcagcccattaagcgatttttttcctccacttacggttggcagcatcgacaagcatgctcgatatctgacgaggtgctggccttggaagagagcgagccgcctcgataaactattccctcttgtcagcgcctcctcccgcacccagcccggagcttcgcgtttgatcccctcccctaatgagctcggttttctcccctccaggcggatgagacgctccccccaccctcgcccgctcagcctttcaagttcagctgggctgagattcaaggtgggggcggcggtggtggaaggaaaaccatttccaggttccgatggggtcacctcccccaggaagtcctcccagaatttctgcagctcagatggtctcgtgcatttgtggggagggtctggggtacagaaagagactgggacctagatatggggggtcgtacagcagtgtccaggtgccacgattgtcatctgtccattcattcaacaaagggtttgggggtgcagagctgggcacaggtgctcccagctgaggactgtgccaacgtgaggggctgggcaggatggggcaggggcccaggaggcggcagagcagcagagaccctcaagaggggacgatgacagcctgatgaacggacacagagttggccaaaccgggcttggtcagcctgcctggaggtgggggagagagtctgaaccccacccggggaggggcaggcaggtggcagggttgggagaagcccccttcccagaccagagaccctccagtctggcttcagcaccaagaacagctccctgcctcttcctctctggagctccagagggacccccatttgtcagatgtcccccagtcgtcgcccagatggaccagcttcttcctgccgaggccttcagggcctcccaggacctccctgggctctagtattttcaataaaataggaatcgtgccgcaacctcagggggtgggcacgcacagacatcaatgttgtttgcagacaatgagtcactggacactggccgatttttctcagcatctccaatattgcaaagtctacccatggaaggggcttggggccaggtgcagtggctcacatctgtaatcccagcactttgggaggccgaggcgggaggatcacttgaggtcaagagttcaagaccaacctggccaatgtagtgagaccctgtctctgcaaaaatttaaaaattagctgggtgtggtggtgaatgcctgtagttccagctactcaggaggctgaggtgggaggatcgcttgagcctgggaggtcgaggctgcagtgagccaagattgcgccactgcactccagcctgggcgacagaggcagatcctgtctctaagaaagagctcaggaagagttgggggaaatgagccaataaatcatttcaaaatttaaaatcagatccaaccccctagttttattaaaatggaacctgaggcctgagaagaattatgcccctcccaccagccagattccagaatcttctctccaggatgaagggcctcatgggcaagaggaggccaggagggaagggggcttccaaggaagacttccacccaccaaaaggagccccagtcaggcgcggcagctcacgcctgtaattccagcactttgggagtccaaggcaggcggatcacctgaggtcaggagttcgaaactagcctggcaagcatggacaaaccccgtctctactaaaaatacaaaaaattagctgggcgtggtcgcaggcgcttgtaatcccagctactctggaggctgaggcaggagaatcgcttgaacccgggaggcagaggttgtggtgagctgagatcgtgccattgcactccagcctgggcaacaagagtgaaacttcgtctcaaaaaaataaaaaaaaggagccccatccattctccaaattataatggtgcactgtgcagggtgttgctgaggtcctggaagagagccagagcccccaggaagcccccccagggtcagggaagacaagggacccagaactgggccagagggagagacctgagtctaggggaagaggaagtaaaggccctgcggtagagtgggcattgaagctgggttctgcaggtagagtaggagtttcttagcaagagctaggagaacatggcccatgtggacagagtcgagaggggctgacacctgggctcaggttgggggatgccacctcctcagaggggactgtaatggtggatctggaagacccaggcttggagccaggctggtgagcccggctcacagcccaaggtttgctggggcctcagccaggactaggagcaggtggtggcagttggaggtgggctggaggagccgggcctgcccagagggacccaggcacccacggggcgagcggcgagggaggcagaaagcaaagcctcaccaacccccccctccactcaccagacatcaaacccagcctccccacctttcgaggttattaatttttcagagaagaaaatgctttttgtattttttccaggcaaaatattgataatgggcttaatgtggccttcctgcttttgtgtgtcgggagagagagcttttctgtcctggccgctgcagaagctgttcgcccccctccagcccccgcagcctccatcggcagaccccatgcacttggccgctgaagcccaggcagggagtgggggcgcgttttgatcgccaccgagcgggttggtgcagcccccctccccatctcgagccctcctacctccgcctgcacaaagccggacgcctgcccgccccaccgtgggtcgatgcaccctgccaggggagctggtgtttcccgcggctccaggctgatacatctttgagttgtttgaaattttgcttcctttctctcatggcgacggggaggcaggaaggcaggggcctctgtgcattcactccttcattcatgcattcattcattcactcactcactcacccagcccccagtcaccatgcacctgctgtgccccaggctctgtgctggatgctggggccaccggccgggacagatcgggcccctgcctcctcaaagttcatagtccaggagagagaagaataggtacaaagccaaaaacttccaggagaaaatatggcattacggacggtgatgagaaccctgtaagacagacacaggaggcctggtgcagtggctcacacctgtaatcccagcactttgggaggccaaagcgggcagatcatgaggtcaggagtttgagaccagcctaaccaacatggcaaaacccagtctctactaaaaatacaaaaattagctgggcatggtggcaggcatctgtaatcccagctactcaggaggctgaggcaggagaatcgcttgaacccaggaggcggaggtggcagtgagccaagatcgtgccactgcactctagcctgggcgacagagtgagactcggtcaaaaaaaaaaaacagacacaggagagagaaactgtgacacaggggagagccaatggaggctggggtctcagggagggcttccctgaggcagtgacctcagctgagacctacagaatgaggatgaggccgggtgcggtggctcatgcctgtgagcctggcactttgggaggccgaggtgggaggatcatttgaggccgggagtttgagaccaacctgcacaacattgtgaaaccctttccgtataaaaaatagaaaaaaaatagccaggcatggtggtgtgtgcctgtggtcccagccacgcaggaggctgaagtgggaggatcgcctgagcccagaaggtcaaggctgcagtaagctgtgatggcaccactgcactccagcctgggcaacatagcgagatggtgtctctacaaaaatttttaaaattaggccgggcgcggtggctcttgcctgtaatcccagcactttgggaggctgaggcgggcggatcatgaggtcaggagatcgagaccatcctggctaacacggtgaaaccccgtctctactaaaaatacaaaaaattagccgggcacggtggcgggtgcctgtagtcccagctactcgggaggctgaggcaggagaatggcgtgaacccgggggggtggagcttacagtgagccgagattgccccactgcactgcagcctgggggacagagtgagactctgtctcagaaaaaaaaaaaaaaaaagaaggataagaggcctcagtgagatggggcagcgaggacctgcccttcctgggggggaacagcctgtgtgaaggcccagaggcgtgaggtagcagaacctgcccattcagtggttttcagacctgaacgtgcagcaggacccccgggggcctcattgaagcccagattcccgctccctcccatatccagaagccccccacattggcaggccctcattcagagaagctggggttgcagaatttgcacttctcacaagttctcgggtcacactgatgctcttggcccggggccctcactccgagaaccacagactcaggggctttgtgagatgaagacaccggccaaccctcgaccccaaggagcaggcaaggggtgggggccagagccggacaaccccagagccctcacttaccctctgggttctctaggagaattcccttgaaactccggtccttgatttccccatctggaaagcgggtgcttgataagtttcctggtttcctgtggctggtgaaggcacgaaccaagacgacacaggtagggtggttaatgcagagcctggcccacagcaagtgtttaataaatgtaagcagtgactgtgagcgctgatgaaggctgtgtatgggattgatgaaggggcaagaggccttcaccaggctggtggccggtgaaaatgcagaaactggatgggcgtggtggctcacacctgctacatgagcactttgggaggccatggcaggagaatcacttgagcccaggagtttgagaccagcctgggtaacatacccagatcccccatctctacaaaaaataaaaacttgccggctgcagtggctcacgcttgtaatcccagcactttggtaggatgaggcgggcggattacttgatgccaggagttcgagaccagcctggccaacgtggtgaaatcctgtctctactaaaaatacaaaagctagttgggcatggtggcacgcacctgtaatcccagctactctggaggctgaggcatgaaaattgctggaacccaggaggtggaagttgcagtgagccgagatcgtgccactgcactccagactgggtgtcagagcaagactgtgtctcagaaacaaaaacaaaaacaaaggcgggcgcggtggctcacacctgtaatcccagaactttgggaggcagaggcgggcagatcacaaggtcaggagattgagaccatcctggctaacacggtgaaaccccgtctctactaaaaatataaaaacttagccaggcagggtggtgggtgcctgtagtcccagctacttgggaggctgaggcaggagaatggcgggaacctgggaggcagagcttgcagtgagctgagatcacaccactgcactccagcctgggcgacagagcgagactctatctcaaaaaaacaaaacaaaacaaacaaaaaacagttagccaggtatggtggtatatgcctgggaagtttgcttgagcccaggatgtcaagtccgcagtgagctatgatggcattgttgcactccaggctgggtgacagagcaagatcctgtctctaaataaataatgcagaaaccaagggcatggcacccatgaatgtgctagctgcagctgcgtaacaaatcactccaagtttaccagcttacagcaacacgcaggcactgtctcccggcttccgtggctcaggagtggcttgactgggtcctctttccaccttctcccacggtgccgatcaaggtgctggctgcgttgagctccttcctgaagttgaaagtccttgaccaaactcctgtggttgtcagaggaatgcgagtccttgaggttgtgggactgaagtccctgatttgttttattttggtagagaaggggtctcactatgttgcccaggctggtgtcaaactcctgggctcaagtgatcctcccacctcaaccttgttttcttcctgactgtcagagttcacccacccaccgttccctgcctggcctcttccagggaccaggagagaaggttctcagtttgctaaatggaggctttttttattttgagacagagtctcactctgttgccctggctggagtgcaatggtgcgatcatagctcacgacagcgattctcctgcctcagcttcttgaatcactgggatgacaggtgtgtgagccactgtgcccaactccagagtggagtcttatacaacacaagttatcgtggtggtgacacctaacacctttgccctattctgttggctacacggaagtcacaagcccaggcctcacttaaggggaagggatttgcaggatgaaacaccagagggctgagaccatggggccactttcttttttttttttttgagacggagtctcgctctgtcgcccaggctggagtgcagtggcgcgatctcggctcactgcaagctctgcctcccgggttcacgccattctcctgcctcagcctcccgagtagctaggactacaggcgcccgccaccatgcccggctaattttttttttgtatttttggtagagacggggtttcaccgtgttagccaggatggtctcgatctcctgacctcgtgatctgcctgccttggcctcccaaagtgctaggattacaggcgtgagccaccgcgcccggccactggggccactttctatcaaccacacctggctcgggcatgcacctgccctcccccatgcatacaggcccacatccatgccttcaaatggccacaaaagtgtgcgtggccatagacatacatacttgcaagtgtttctctttttgtgttttgttttttgttttttttgagacggagtcttgctctgtcacccaggctggagtgcaatggcacaatcgcagctcactgcaacctccgcctcctgggttcaactgattctcctgcctcagcctcctgagtagctgggattacaggtgcgtgccaccacacctggctaatttttgtatttttagtagagacagggtttcaccatgttggtcaggctggtctcaaacccctgacctcgtgatcctcccgcctcagcctcccaaagtgctgggatgacaggcatgagccaccatacccggccagtgtttctctttttgcattgcccactgggaagctcagagacaaaattatggcctgtgtgtagcaaaggttcagaaccacctattgtgacttctcttccagcgacatctctcgaccttggttgtaattcattttctctggctgccttgtctgtttgcaattctttcctccccagtctttctgggcccatagaggctgacaatggcagcggcttctgtctgctcagcatctgagtgcagttctaaggaccttataagaattttctcattttatgctttcaagaaatctcctcctacagaggagggatctgccacacagagaggtcgtgagagccaccccaaggacaccagctgggagatgggagagctgggatgagaacctggactcaatccccagcgggcagatttttttttctttttagacggagtctcgctctgtcgccaggctggagtgcagtggtgcaatctcggctgactgcaacctccaactccctgcttcaagtgattctcctgcctcagcctcatgagtagctgggattacaggcatgtgccaccacacccagctaatttttgtatttttagtagagatggggtttcaccacgttggccaggatggtctcaaactcctgaccttgtgatccaccagcgggcagatttgagagctgggctacacactgacatgctttacatgcagagtgaccaagccaggagaatccaccagcaggggactgtggcgtcgcaaccccctccctggggtcgcaacctcctccccggggtctcagcccaagctttgaatgtgggctgccactggcataaataatcgtttataggccgggcacggtggctcacgcctgtcatcccaacactttgggaggccgaggcgggtgcatcacgaggtcaggagttcaagaccagcctggccaagatggtgaaaccccatctctactaaaaatacaacaattagccgggtgtggtggcggacgcctgtaatcccagctactcgggaggctgaggcaggagaatcacttgaacccaggaagtggaggtttcagtgagccaagattgcatcactgcactccagcctgggcaacggagcaagactccgtctcaaaaaaaaaaaaaaaatcgtttacaaatgtgttccaccacacattgatcccccacgagagaaagtgctgcttcagggaattctccctcgagtggcgtccccaggccggcccagctgcacccaacgaagtccacacgccaggcctgtccaggagccccttttggccactggacaagggtctggctgggccctacagccctcccagatctgatcccccaacaaagggaagaccaggatccagcgccacggtgccttcatgagctagacaggccctgagtcccgtgctccggattccactgaacagaactctcgtgcacgtttccccacggcgtgccccccagccggagccgggtgatggggacatcatcacaaactctgtgccctccaagggctcccaggcttggagagggagacaacagaaaaaggagcccgccatgctggcagcagggggcacacagtaggtccgcagcaggggaacaggaggacggattttacaggaccgggcaggggcacagtagggccctgttggccataccgacctctgactcctagttccccgccgaagccacctctttgcagctttgtgcccggggtcctccttgcacacctgggttttcctcgggccgccctccgggtagaacagctgacgtggatgagcgctgaccacgtaccagggcccgggccaagcatgcgacttacatctattcaataagtcaacgtggtccccattttacagatggagaaactgaggcacggcgagtgacttgagctgcccagggcccgtcagcaggggaaggggtgccagctgaactcgggagctctggcctgtcccgtggtgagccccacggcctgagtccacatcccagttctgccctttttaaggttcagggagctgcggcctcagtttgctcactcacaaaatgggaacgagtgtccggaagggatggaagggcacatgaacagaggcccccattctgaccattcttttttttttttttttttgagacggagtcttgctctgtcacccaggctggagggcagtggcgcgatctcggctcactgcaagctccgcctctcgggttcacgccattctcctgcctcagcctcccgagtagctgggactacaggtgcccgccaccatacccggctaattgttgtatttttagtagagacggggtttcaccatgttggccaggctggtctcaaactcctgacctcaggtgatccgcccacctcagcctcccaaagtgctgggattacaggtgtcagccactgcaccccgcctgacgattcttaaagaagcaaaatccaggcccccaccccagcccggccccacaccagctggctcccaggaggcctgggctctgcctcgagcaccccattcactcctctcctgcagccccagcatttctacccattgagaggaatcaaaaaacagccccagccccaggaaggtggaaggaacagaaaaccagggctggtgcccacagggaaactggaacaaacccataaaactgaggctggtgaaccccaggccacctaactccaactgcacgggagccccggtaccatctccccagaatccgcccctcaggcctcagtttgctcacctgtgaagtggggcctgcaccgcccagctcaagggactatgagggaatctgcgcagatggggacaaagcagcctcccttcgctttgtgcaaacctctcctccttgccccggcctcctcctggcctccagagcagagctggcccccgactccagctcccccaggatcgatgggaggatcaattccagcagcagcaccgggctgtggggggaggggggctcctctgggaagcctccagttcccctcctccctccccctcctttcctcccccctccccttcctcccctttctcaccctcctcccatctcccctctgcttcctccccctcctcctcttcctccccctcctccccatcccttcttcctcatccttttccctcacctccccctccctcctcctcttcccccctccagcttctgtcctctgagcctggcccaggattccttgcccctcccccaccggtccaccctggctgtttatggggtgggcagaggctggtggccgcccttgtcacagcctttcctgagcactgtcagatgtcctcaagggtgcactgtgtgtgttttatccccattccacagatggggaaactgaggctccagaagggtccctgatgtgggaaatgaaggcggggctgggatttgagtctggaacccaccctcaaccccaaaggggagaagccccggacaccacgcaggcgctttgggaatgaggcacccttggcggatggactgggcgggctggggtcagaggtcacctgccctgcccagcagccgcatggagatcacccagtagccctcaggagtcggggctcccacttgtgaaccgggtacgccacccctggagatgcagagctggctggacacgcacctacctccatcttctattcccctctgagagctgggggcgggtggttctttggtttttctccagggaatgagaggcgccctctctggggggtaagagccttggatctgcctgtttcctcatcggtaaaagcaaggggtcaacaggatgaccccatccctccccaatccccttctcttcttgccggcgctatgacccctggggagcccctgcccccaggcctggcagcccccagggaccctcctactggggcctgccacggtggggggacaatgtttcccattttctgcggagccccccaactctcacctccaggcagaggtgaggtgatgaggggctggaggaggctccccctccaattccatccttgggaaatgccaccctctcacctcctggcgcccagggagttcagtaataacagaaacgttttgtttggttttgcttaaagcgagcaggagggagagcgcgaagccaacggctcctgcccagcccaattgtggggatttaccatggaggcgattactgagcggaactgcgggcggctctgctcggagggtcccgtgcttgttagggaggtgggagaaacagcaattacagctgttagcaccgaggggaggggaggagggggaaggagaaacggaggaagcagaggagaggggagcagggagaaggaagaaggaagagtggatgggggagggagaggaggctggaagggaggaggggagggctggaaggagaagggggagtagaaggaaggaaagggaggagccaggagggagactaggaatgggaggaggggggaagagggagaggaggagggggaaggaggggggaagggggaaggaaagtagaggagggggtaggaggagtgggaagaatggggaaggatggggaggagggagaagggggagtagaagggggaaggatggggagggaggggagaggaggagtgggaagaatggggaaggatggggaggaggggcaggaagggggaggagggagaggaggaggaggatggaggaggagtggggaggaagagggagggtgaggaggagggagaggaggaaggaaatggaggaggagtggggaggaagggggaggatgggggaggagggagaggaggagggagatggaggaggagggggaggaagggggaggatggggaggagggagaggaggaggaggatggaggaggagggggaggacgaggtaggaggatcctcacccttcaagagcatcaagttttcctccccagtgggagaagctgaggcccagagagaagtctctgctctgacaccccacaagagctttcccaaccaacaggcccctctgggactccctctatgccctgcccagggccccacagggctcgctctgcttcctgctctcttgctgcaggcctggagctgggaggtgggcaggtgatggccagagcaggaggcggctggccccttcccctgtccgctgcctcaaatgattaaccagtgcggctggagtgaggagtggacactgggagccggttcctcaaataccctccacacctttgaccggcgcatgggccagaacgggggacccctccagctcaggctgaagagctcccccaactgccgggtccagagggtcctgcgctccctgggatcgcccgaagggctgggtcggagggggaccctggcgcagggaacgttctctgtaactgagatccgcgtttctactcaggagctcagctgagactctctgcgtggccaaccctctccagagaccggctccaccgccagccagattggatgctgagcgtgtccacacagcacgcactcactgggactcagcgtgctgggactcagctccccgccgcccagtccctcgggcctaggtcagctcgccagctggtggcctgaggcagatctcaggacctccctgtgcctcagtttcctcacctgaaaaatgggaataattggagttgcttcctcagagtacccctgcccctagctccctgcaggtacagtggggatggggcaggagatagagcggggacctgcaggacgtacccctcccccagggaatgggggacgccaccccacccctggcgagcccggaaggtggctgctgattgaacaatgggagaaacaagctttcttctagcgcaaggtgactcacctgctggcccagggacaaagctcccccagccactccccaccgcccgccaccccccaccgcccgccacacacacacacacacacacatacacacacacacaccgcacagcacggagagggggtgagtcattccaccccaccacatctgtgatggcctccctgggtgcgtactaacctgtggggtggggggattatactaagggccgcccgggaccctccctgcttggcctcacagccagggagagaaggcccaaccacccccagcctggcattcaaggcctggctttgaacacatgccccccccccacacaccccagcttcattcagttttatctcattgactcattcaacaaacattccctaatgaagtcctgtgagggccccgaaactgggctaacgccagacgcctccccagccccaccgcctcttcctcagatgacaaggagtcttttcgtccttccattggcctacctgacttggactcctacacatcctacaaaacccaacctcagggctcctcctccaggaagggaggactgccgcctccccagttctgatctcagggggatggggatgacttttcccctccctaagtatgggagccccagcgggagggacagaggctgtggccgcagctctagggtggtgggggcaggggagcaggagtgatctgagaagtttgctaaatccagcgaatggcctggttcccctcccccatccccggtctgcagattctgcctaaggaggtgcgaatcccttcccctttccccattccccattccccagtccaacaccccctccccacccagaggtccacgaggcgagacagacccaaagagagaggcaaggacgtgggcgttggtcggtcttgcggggaggaggtgccgtgctctccccacttcctgacccagcagaaagcgcccgggcgtgtccagataaaccgcgccttaatcgaggcgccattccggcccggaacaggccaggcccaggtgaggctcagagccagatgcgcccagcctaacccacctggggacgcccctcggaccctcccggggcggggtcctcactcccgaccaggacctctgtctctgcatctgcgaagtgggcgcccccaggcctgtgctccccccacccacctgtcgtctcgtctcggctttcagggtgcagagtggacactcccaggtgtccaagccggcgagctcgggtcccgcagaaccggcggccctggagacgccccgagggcagccccgctgcagccttgctcgggtcccctagcccggcgcctccgcaaaccaacccaccgcgggccgccgagccccgctccgggatccgccggctgcctccatcccagaagagtgcgcagagaattaaatctagatatttacatgtttaatggctaaaggagcctgtcttctggcagggcagggagggcgctcaggtggtttaactcagcgccgggatcccgctcagctgcgggggccgcgaaccccgccgctgggccgacgattgggcccctccggagcgcggcgcccaacgcgggtttcgttgcgtcggggaagtccgtggcctgcagcgtccagtccccaggctgtcagccgagccctggagtggggcgttctccaggcccccaacccctgatccaggccgttcccctcccgcgcaccctccggcgggggctgcagcccgcgcccctcgccgccaagccccattttcccacagtgcaaactgcagcaaacgaactggttttctcctgagcgcacgctgcggggagacgattccaacggcgtccagtgaggaggggcccaggcctgcgagacggggcgcgttcctgtccccagacccctccggctgcgcctcaacccccagcccggctctctgacctgcatcggtcgggccgggcacagaggaggcaaagcaggcggaggccgcgagaggagagcagcctgacctcccgcctgagcccggacccttcccctcgggcaccctcggacgcccccgccccagcgtgttactttctagatggggaaactgaggcgcggccagggcgatgcggcggaagtcccgcgcccggccgtctcccgcgcctgccagacagagccccgagaagagggcatagaattccctcctctaattgtgtcccagaactctgggacgacggaggccaagctgctgagggaggggacgaggacgcggggccccagggaccaacccctccgctccccggccagccgcggccgcccagcctcggtgccccggcgcaaacaagcgcggtgtttgccgagcgcgaggcgggcggcgcggcccgagagcgatgaggattcgatggagccgctcgccgcggcgggggcaacggagcccgggcgggcgcggggatcgatcgggcacagctgtcgcctaagagcccgcgggagcatccacccgcgggccagagctgcccgggcgccccgcaactgcgggcaggaaatccgggacgtcgggcccgccaggggcgaaaccccaaagtcgcgacacccggggtggggaggtcaggacgtccccacggccaacgtggaaccttcgggagccgcgcgctcagcctcgccgggacccccgccaggccgtaaaagcccagagtctccccccaaatctaaataaaatccccagaccccgcccgaacgaaggcggctggagtccagagggagaactcctgccacacactaggcaccggcggccgggatttggggcgcccgcaggtttcgggggccgggagtgggagcagagcggatctagggctgcggctgggcttgggtggggcgcgcattcattgccatcgtttagtaaaacctcgctttaataaaagcagggaggggtgcgcagagcccggacactttcatttcggtgggagacaaatcgaatcagaaagtcagttgggggcgcactgtgcagggttctgggggagccccaggaaaggaaaacttgaggtatctgactctgcctttgatatttttagctgcaatgggagagtcaataacaacagggaaggtggtgtgtccaaaaatgggggaggtgtggaggattaaagagggggttcaagcttagggggtccgtttagggagtttgaagccgtggagagtgcgcacccctggggcatgggtggaggcccccagtcctcccctccacccgcgggactctccaagccctgaggttggcaggaccagaggctgccctttttgactcctcccagacgcaggccaggcacagagagggtgagcgttggtctggggcagcccagcacctgctgaggtccccctccccaactcccagacacagactcgggctctgggagtcaaactttcatcttcctggaggggatactgaggccagagagcttcctcgaggtggctgaggtccctgtggggtggggaagggggacttcttgtcccgatccagcccacccctccccctgcccacaatttgcctaatgacccaggatcgatctgggcctgggcagccagcctacccggtggccggctcaattctattttactaattactaaaaggctgctgctggtggggagaagcaagctgggggctccagggggccacagtccctctcttggggccagcaaaattctgttcaatctctcaacgggaccacagcctctacaaggagtgagatccccatccctgggggagtccaagtgtccatcagccgaagggaggggtgaggggcttcgcagacctggatagggttaggtccaccaggctgggctgccccttccaagtctagggagctttggaaggggtctgtggccaccttagcgtgtcctgaggcagcagaggggagaggccctcttcctctcggagtccctgaccctcgtcttctctttcaaaatggatgctttccctgctagaaaagccacacacgcttgctattaaaatgaacacgatcatcaagctgtaaaaaatatatttaaaaggaagcctgcaaaatcccagctccctaggagctcccccacattggcatttgggggaacttccttccaccttgttatcctcccacccgtagagacccccagcccccacctggtctgcgcttcttgagcctgggatgctagcgttttatggcggctgattgatttttagatctcacgattatttttaattatctgtgattgttggagggtgagaatgaggagcgcaggctggggctctgtgcagccacatcccccccgccgagattcagcatctgcacggggagtggggtacgcgactgttcggacctgcccctctcttcccacctggaagatgggtgtaattatgtaaactccagaaattatacctgaaccctggaactggaaagtttagggaccgacacttcagggggcaggagttagcacttgggcagatgtaggaatgaaggggggaactctagggccaccacccccccaccttgggccagagacacccggaaaaattgtgatttgacttccccctctctggggctgagagaggagagtatgcctggtaaataacaggcacttactaaatgccgagccctaagcagcgagtactaacaggggtccccttcagccctatccctccccaggacttggatcaggccacctcaggctgggggcccagatcattcaggccccctctctctctggctgttgtggtcagcatagactcacctccggctcccagctgggcaggctggagggcaccccctcccacaccagagaaggggaaactgaggcacagaaagggccctattccagagccaacctagtcttggttcagaaaatcgcatctccaatgtgtagccacgtctacaggggccaggaaatctggatgcaggtgcaaagctggggccggggtttgcccagaaggtttgcaccaaaggggaagtgacagcctgactgtgtcctcccctcttccttcagctttgagccctgatgcaaccctctgagatgggggtaactgggggctcccgcgaaccgactgcctgacccatccccttcctcttctagaaagtgcacaagcgttaccccgggggtggggggggcagaggcaacggggaagcaggaaggggctgaggctggttttggactctgcaccgtagcctctggcctacaagacagagcatcctctagattctggtctggcccctccagatccgcagccctgaccttaccccactggcgggatctagtcccctgggggtctctctgattataggagcccttcccccatctatcccagttcccaggggcccctggggctcacctgtctccaggtgctgagaaaaaggagacccctgcctccccccacattgaagagaagccccagggacaaagaggagtttgcaccagcgacgtctcagaagacaggggatccagcctcagcctccgtgggctggagggtgacaggggctcttagtggtcacccccaggctccagtgcctccagcggccgcactgtaaaaaggccctgcaattagaaggggcctttggcaaccccgaggccgggcagcccattgtacagttggggaaacggaggcccaggtgcccacacatgggcagaggctgacccctggggcgcacggaggccctgacctagccttaggacctcccttttcccccacttcctccacaaagaggttgtgggaagggggctgtgactccgtaggtgtgagtgggagtcgggggaagctgagcttgcagtggggatctagctcctgggggtctgtagggaacggggggggggggggacacgtacattacaggcgaccgtccagccacactcccagaaactccctggagatggacttgggggtgccaggcagaaagccacatctgggactctggagagaatcacacagagacgcgaaatcggagactctgggtcgaggcccccagccccacctgggcagagtctgtcctcggacccccgcccgctgtcccccgggtacggcctgccccagcgggcgcgggcgggcgcagtggccagggacgccgaagccccaagtctggccgacttcggcctgcttggtgctcgagtggggccggggcgggcggagagcgaggctgcgggaggcagcggtggcaggagcgggtgggcgggggcgctgacgtcagacccgggcccgggcgccggcggccgctcccctgccacatcctggtggccgcgctcgcagccgggccgggccgtgcgccgcgcagcctggcagcctcgcgcgcagccaccggggagcgggcgggagtcatgcagcggccttgagcactaggggccggcgctgaggagcgcgcgcggcgggagggcagccgagcatggagctgagcctggagagcctggggggcctgcacagcgtggcccacgcgcaggcgggcgagctgctgagcccgggccacgcgcgctcggcggcggcgcagcaccgcggcctggtggcgcccgggcgcccgggcctggtggccggcatggcgagcctgctggacggcggcggcggcggcggcggtgggggcgccgggggcgcgggcggcgcgggcagcgcgggcggcggcgcggacttccgcggggaactggcgggcccgctgcacccggcaatgggcatggcctgcgaggcgccgggcctgggcggcacctacacgacgctcacgcccctgcagcacctgccgccgctcgcggccgtggccgacaagttccaccagcacgcggcggccgcggccgtggccggggcgcacggcggccatccccacgcgcacccgcacccggcggccgcgccgcccccgccacccccgccgcagcgtctggcggccagcgtgagcggcagcttcaccctcatgcgcgacgagcgggcggcgctcgcctccgtgggccacctctacggaccctacggcaaggagctgcccgccatggggtcgccgctgtcgccgctgcccaacgcgctgccgcccgcgctgcacggcgccccgcagcccccgccgccgccaccacccccgccgctggccgcctacggcccgccaggccacctggctggggacaagctgctgccgcccgccgccttcgagccgcacgccgcgctgctgggacgcgcggaggacgcactggcccgcgggctgcccggaggcggcggcggcacaggcagcggcggagcgggcagcgggagcgccgcggggctgctggcgccgctgggcgggctggcggcggccggggcgcacgggccgcacgggggaggcggcggccccggcgggagcggcggcggccccagcgcgggcgcagcggccgaggagatcaacaccaaggaggtggcgcagcgcatcacggcggagctgaagcgctacagcatcccgcaggcaatcttcgcgcagcggatcctgtgtcgctctcagggcacgctctccgacctgctgcgcaaccccaagccgtggagcaagctcaaatccggccgcgagaccttccgcaggatgtggaagtggctgcaggagccagagttccagcgcatgtcggcgctgcgcttggcaggtaggagcgtggcgcgcagggccagaccctgggggcgccggctctggactcccgagcacctagcggggcggcggccgatgcccggggccagcgccccaagccccgcccgtgcgccccggcagcccgggaccccctatcaggaagctagaccgcgatccgcgccgctgcccgtttgtaccgttgccaaaagggagaaagggattgtgccgcctccccgccccccggtcgccgcttctgcccctttcgggagcgcgtaggggttctctagtccttgttagactgctgggaggctccgagcctctccccaagcagccctcagggaagctcattgtgtgtgtgcgtgtgtgtgtgtgagcgcgcgcctgttggggggagctgtgtccccgaacgagctgctgttgtcggctaaggtgccactcccctcctccagagtgggtggagaggggctgttgagcccccagccccgggccacagagctccgagacgttgcggcgggcgcctgcagctcagcagcagaggccgagcccgcgctcatccccccacctgccccagcgcgcgcttctttgtagttcggccccgcgatcgataccccctccctctcccctccggccgctggcaaaggtcacccgagaatggcgggggaggggcggccccggggaccctcggcccgcgccgcccggaggccttcacaccccgacccggcgcccgccccgcgcagtttggtcgtggctcgggtgcgcgcgcccctgcccgcctggctttggggttttgtgtctctcatgtccacttctctcctctctcggtcggaacacactggtatctctatgtttttctcttgctctccgttttgctcttgttcctgctcattatctcttctccctgtcggtctctccgcctctgtctctgtctcatactcagccaccggccccctggggaccctcctccctcctccctcccagctgacaacagctaagtccacacctgccctctgacaggcagcccggccaggcccccatttcctaggtgggggtgtaagggtgcaggagggcccctggcctaggtgggggtttctttccctggtggtgctggggagggggctgtccacccgggccacagggacaatagccgcggcggctggcgcctgatcgatcgcttctccgagcacaagggcgagaaaggcgggggctctgggaggcgccccactagcaaagaggcagaggggcttgcggctgtgcccccaggcagcccgtccaggcaggggggctgggcgaagagaggacagcggggtgtcctgtgctgttcctccctagaaagccattccctccctccaccccaggaggaccagacaaccccctgggagcctggacccacaggccggcctcagtttcccccttctgcagagcaagcaaggtgactagctggaacctcttatgggattcttagatttttctgctttggggcacgggaaaataaatagtctttcgcgtgtggcagggtaaccttgtgctcagggaggtccgggaacctggacgatttcagtctgtcctgctcccctccccatgacacatacagcggcactcgtgcgctcaccatagaccggcggtcatatccgcacacagccacggccctcgaggtgcagtgcgaggcctcaggtggcagagggcacacccctggcagctctatttatttattgagacggagtttcactcttgtcgcccaggctgtagtgtagtggtgcgatctcggctcactgcagcctctgcctcccaggttcaagcgattcttccgccttagcctcctgaatagctgggattacagacgcccgccaccacgcctggctattttttttttttttttttttttttgtatttttagtagagatggagtttcaccatgttggccaggctggtctcaaactcctgacctcaggtgatccgcccgcttctgcctcccaaagtgctgggattacacaggcttgagccaccccgccgggcctccctctgacgtttaaacaccaactggttgccatcacaccagtaaggcagggacagtttctatagcccgatacccaccacctcctgcctcctctctagcacatatttgggggacattgtgtccaccgtgggtgcacccagagtccacaccactctccatttttcccactgtcacgttatgtaactaatgacccattagcagtactggaattgcagatttgggggccacagaaaacatcagccagagcgtcacagaagggcaaaccgcaggcgagaagtcccatggggggggggtgggctccccgcagccgggtcagcagcacccagcacccgccctgagtggacaccgcctgcttcgcctgcacctgaccctgcacccaggtgggtgttcgctcctgccgaccccacagccatccaggcctccgccgtcccctttctgccacggggagagttgcagatggggaaacaggctccgtttgtgcctcgccttcctgacttgtgacaatgacaaacagtctcagctctgggagtctgggtttcctgtcgaggaagggagagttagaacagtcgccgtctcaggggtgcgtgggggaaccggaggggtgagcgcagctcctggcaccccgagcctcccgcagggcgctggggcgttgaggatgataaacccggaccacgctgcccgcctgctctctgccgggtccgctgcccacgccgtggccccgccgcgcggccccgcggccgcggggttcacgccgtcaaccttgcgcacctgtcgcgtctcaggtgccctgggggccgcgtctacaccaccggactccgcctggggcgtaagaggtggcgggggcgagggccgcggggtcactaggctccggcccaggcctttagttccggtcgctgcgcaaatgaaaagcggttaagtggcggcaaatcgcggcggttagggggagacggccggatgcgtccccatctccacctaacacggcgacgccccaacgctggtgctcggaaagggaactctgcccccgccccgcccccgcaccatttcaaccccgcagcagaggactcgccgccctttctactccggcatccccattccccgctccgcgagcaccgcgggcctccccaggcctcctccaaggagaactttgcgccccgggtctcccgtcgcgcttgcccggctcggggcgggccacgcgtttccgcaggtgccgagtgtcctgccgggcgccggggccaggacagagacggggacagggagggagaaagacccgcaggtgcagacggagagggagggggagacggggagatggagagagagggaggggtcgcgagacaaaaccagagagtggggagggagagaccgggagcgggagaaacagacggggagaagagaaaaagaagcccagaaaggaacagaggtgaaggagagacgaaaagagaggcagagagaccaaaaaaaaaaaaaaaagagagagagagagagagagacagagatgggagaggaactctgggtgctggaggctgcctctgtgtccacccccgccctcccacagccccctccttcttccccatggggtaggacttgggagaggggaataggtgttttccttgtttcaccaaagcacgcaagaaatcccaccgcagacctcggagtcccggccccactgcccgttctgcgtgcctcagtttacccatctgtaaaatgtgcgtgtggtgggccgaattctgggtctgacactgtcagattctggaccccgtcgtctgggagtcctgcagcccccaagcccattcccatggggctgggagcctcaccctacccccaccccatggtcctccgagtcccgcacttcggagctgcctcctggtcaaagctctcccctggcgccgtctccaacagtaattatgggagaggggctgggggaggggcgggcgggctcctcggcgggggtgggggcggtcgatgaattcgaattaccgtctctaattcatcaccgtcgccgggtcgatagcttcggccgtcttcaaatattgtttaaattgcaactccggaggaaaagtattttttgtaactgatcagaaaaaaaatacgtatatagataatacaaagttagatggaggtggttgaaagaagggcctcatctcctcctgtgggcaccatggggaggcaggagcccagaatccctgagggatggtggagcccagcatggaggaaactgaggcagggaggaccccccacccccaccccaggtggatgggatgctttgcccttaagcagaacgaagtgtcctagggacaaaaaccagagctgtgtatggagttgcatgctgagggcagctggtgcaggaattgggcacctctgtttggtggtgggtgagcaggggggatgccagggactggggacctgaggggaaggacatggaaaggaaaaagaggcagaacctcttccccacccaggctcatacaggccctccctccccggcttctcccccctacccgctgccaccatcaagggctgaggttgaaatgggcgaggcaatctgggagtcccccttaaagggacaggtgtccaccccccacaagcactctggaacccccacccaaactctggatgaaggggagggatgagcagggagaggaggaggaggaggagagggaagggagggaaggaaggggagagaggagagagggaaagacccctgtgccttttgcaaaaaccccactttccactgcaaggggtccacgcctcttacggacacccccagaaaaatatgccccacgccactagacagtagagataaccaaggttgggggcttggagacccgggccttccctgggctctgtccctggctgatccctggcaaaaggacttgagcctcagttttcttatctgagaaatgggcagaatgaaatgacgcctaggagagggggtatgaggggctggaggggctcaggggtctgaaggggccaccgtaggtttccacagggatgcacggagtgtggatagaccgagaccgtgcccagggccacgagaaccagacccacgtggggctgcgcgcgagactcaggtgactctggtgcccccacaccagcaccctcccacaaaacttcagggcccggggaggagcagccctagctagggacctgggccaggatcagggatcaggctcccgcctcccgtgcagagggggagggagatggggaggggtcccactggatgcccacagcccttcccctcctcctcagctcacctgcccggaacgacattttgaacccgatgcggttcccatgcccaccctacagaccagcaagctgaggccgaagagaaaggcgcttgccagagccccgcactgcttctgatgcggagtcagcttccgctaggaggggccgtaacaggaccagggcgtggctttcggctgctctgaccccgctgagtctggtgggcctaacactaggctggagatgcccaggctccctgacctccagcagagatgggggagcattccaggaaggtgacgcttcgggacgaagtcttggaggtgtattgaggtcaaggaccacagagaagggaccggcgggggggcggggggtggcactttccacgttctcagccacttggccgatcctcaggtggggccaggtgaccggccagttccacctccccaccccacaggagccacatcctttaggggtggtgaggcctgcgctgcgcttccccctgtgccccagctcctccaagtatgatgatgttgtgggcatgtgagtcctctcacctgggagaccaccggagactcccagagaggatgggcggtgggggggggccaggtcccagcctcatcgagtccagctcagagcccccaggaccatccccgcttttgcttttcccagcagacctccccctcccaacgccagcctcggtcccaataattcctttctgtagcctgggagacagggacgctcgcccccaacacagaggagtctgggggagtctcttgagtggtgaggggctggagctggcctttggctctgaagtcctcttagcctgaagtcctagaagtaatcatgaccattcattcttctctctgaatctccctcccattccgtgctgcttctccaacaaccattaccactctagtctaaaccactatggtggtctcctcctccacctccatcatggcttcccagctccattcctgctctttttttttttttttttttttttggagatggagttttgctcttgtcgtccaggctggagtgcagtggcgcaacctcggctcactgcaacctctgcctcccaggttcaagtgattctcctgcctcagcctaccaagtagctgagattacaggcatgagccaccacgcccagctaatttttgtgtttttagtagagaccgggtttcaccacgttgaccaggctggtctcaaattcctgacctcagatgatccacccacctcggccacccaaagtgctgggatgacaggcatgaaccaccgtgcccagccttctcctccttctcactgccgtctcccccacatcctaagggagctttgcatggccactttgggttggcaccccgggttggcaccctgccccgtggctccccagagccctaaaatataaatgtggtttcctgtggtggcctacagtgcctgaccctggcctcctgcgtggatgtgggaggggacttctggccggtgggaccagcagggacaaaggctgggaggtgggaaagtcctgagcagctgttaggagggaggctgagccgggcaggtagcccggcttacccgggagagctggcgctgggtggaatcaagttcttaattaaatatgggccctgatcaatagggagggaagcactggtggggtaggggagaggctgaacaaggagccagggagacccacctgaccttgggcagccttgggacacctacggcctcagttttccctctgccaagtaggtgctaatgtgagaggggctgagaaaccggcacccctcctgagtcccgagtgtgggcagatgtggggggcgatgggggacccctccgagctaccaagtcatgacctcagagccacagattcacagaagagagaaacaaagactggaagatgtgcctggcacaggctgctggagaggcgtgcccgggtcacaagtgtagacgcacccggagacacgtgtgtagacgcctccgttcacactgggacgagtgcagactgacccaggacccccatccgccctctggcagtcttgagccagcaactcccctaagtggggtgcggggacatctggaagacgccccatctccccctggacgcagtggctgcgccatctggagaccctcgtgctggctgctgggggtcctgcgtgccttccgcgcgcccccagctgcgcccgccagccctccaaccctcctgccctcctgccctcctgccctcctctctgggagtcgggacagaagctgctgggctctcctccctggagctggggctttgggaaggtcgagtagaccctcagtgagtgggatgcgcgagttggggacgctagttgcggggcagcaggggtccacgcatttccaagcgccctttcccgtccaaggacctgctggggggatgactgtgcctcagtttccatcacccagcaaacgccgtcccgcagcacccgggaagctgcggagtcgggctggggccgccgcgttgcgcacatcggtccttggcgggtgtgtggatcccagagcgcgcccggcccccaacagcctgacaggacctggacgcacgtgccccggcgccaggagacccgggacccgggaccacgcgcccgcggccttggagcctcagggtcactggtgcgggctccgcaggaaagcgcagcccccagcaggcacccaccatcccacccccgcatcccaccccaggggaaaccgcgccgcaccaggcgcgagtgttcttcttccttgtctggcgccccagaaccgcggccgtcctgggtgcgctcagctccagcgcagtgggaggacaagacacgttcctcctcccctcctccacctcccttgtttttgctccctggttccctaaaatattctacattcttttggcccggcggggaggctcaaacctgtagtcccagcactttgggaggccaaggcaagaggatctcttgaggccaggagttccagaccagcctgggcaatagggagaccgcatctctataaaaatgtttttaaattagccagatgtggccgggtgcggtggctcacgcctgtaatctcagcactttgggaggccgaggtgggtagatcatctgaggccaggagttcgagaccagcctggccaacacggcgaaaccccatgtctactaaaaatacaaaaattagccgggcgtggtggcacatgcctgcaatcccagctactccggaggctgcgacaggagaatcgcttgaacccaggaggcagaggttgcagtgagccgagattgcaccattgcactccggcagcctgggtgacagagtgagactccatctcaaaaaaaaaaaaaaaaaaaaaaaaaaaaaattagccagatgtggtggtgtacatctgtggccccggctactcaggaggctgagccaggaggatctcttgagcaagggaggtcgaggctgcagtgagacatgactgcgtcacttcattccagcctgggcaacacaggctgaccctgtctcaaaaaatgataaacaaataaataaatcgacatgattttacaatagttaacgcattcgccagtttccgaatttcaatgcaagatgaggtggcttccattgccctcccttctgcaaatcacagtctgtatttctccttcttgcaaaaggctgcgctccagggataaattctttttatttcccttttttgttttttttttttttttaacagaaaggggagcttcagatgctccgagattcttccccccggctcagatccgtgaagcgcgcatcctggtcatttttgccggccgcctagtactctctgactcggcggtggtttcaggttttcctgaaccacttccccgccccgctgacatttaggctgtttccaatcgttcgcggtcaccatagcggctgcaatgaatacgtccggggcggatcattttacgagtgtgagtttatctgtggattaatttcccaataattgaaacgctgggtcagcctccccagcccctttctgggtggccgcttcagccgcttcttatcactgattcctttcctgtcatctttttcaaatccatttcccactgcaggcgctgtgtctccgtaacattttttttaaaaatcaacgccttgtgcgtgcgtgtgtttgcccactggctttgctcctgtttgagggtgcctgaatggggtgggtctctgtagctgaatgtccgagggtgagaggtgccccctgacacccccatgcccccaccccatggcggcccagcctccagatggagccacgagggagggacagcccgagagtccaagtggaaatgcgtttcccggttaagtctttgaaggctcagaactaatttgaaaatgcagtcattaaaatcccatcaggggaggctggcggggaaagctggagggagaggggtggggacaagagggaggctgggcgcctgctgaggccaaggtgggctccgcgtgagatgtgggcagggcaggcatggggagggtaagccacccagagtggaggggtagtgggaacagagtggggccagatgaggggctggggaggcctctgggggtccacgcctggggcatgactcagccccatctccttggagaaggttccactgcctcccacccatgggaatcaattttccagctccccgaggggtgcagggtgtagacagagggtgtaggtatgtgacccgggccccccacagtaactggacatgtgaccttgggcaagtcacccactgactcgagtctggagaggccacgggggggggatgcgcaggggggacaagacaccagcatgggggtggggggcatcagtacaacccacatctggggcagggcagctggtggcggggacaggacgcgtcgccaaggaaaccggtcatcatcccagccggagaccgggctccatattgaattgtctgctccctgaagccagaggtggctgagggaggggatctccagctccaggacacagggaggacgggcacacagcggggtagactcacgtggcttggtggtttggggcactgtacagactgtcgggcacagagggacatgggatggtcacttgaatcgcccattgctgcatcctggggcgtcttcttctcccttgggcattgcccagctggtctccatctcctctagttgctctttgatctcctccctggaccttggggaccccccaggagcctccacatccctcccgtcctggtgccaccctggcttgtgtctctcctgccgtgccgcccccagcactgctggcgtccactgggattcagggaccttccctccagctgtcccgaagcctgggcctggtcttctggtccatcctccctcccagccagcagtgtatccactcgaaggcctcagagagcccagtggagcccgcgcctcccctccagtacccacccaaaggcgtcctctctccccctttcctggactcagagcggagctggcctcctcattggggaacagagtcccaggcagccgccgcttcacgctgtcctgtgactgtgagtggaggccagctcctggagctgcctctctctggcctcacgcagcagctgctccctgaatggtgaatggatgagtcggttgcaggtccgtgcttcggcgttcattccttcgtgactctcgggactgcggcccggtggggacacagggctctgggtcactgcgtccacttgataaaccaggaacctgatgtccagagaggccagggtgcgcgttcaaggccactcggcccgcagagcccacccgcgtccccatggctgcagtggtgaggggagcagggggaggcagagaggagcccaccctggggctgggcggacatggatgcgtaacccacaccgcaggcttctgcggggtgacacccagactcaccccaagaccctgcacaccctacagctctcacgtctcacgtccacaccgcgagccagctgcatcccacacagggatgtcacaccaagatccgttgcctcatccaccgcccgtccaaggccccacaagctgatgccggttttcccgcccagaactggaacagctttcctaacggtcacaggtttcttagcttctcacttgggtggggtttggatgtgcaaggctgccgacccccatcgtggttgagcgcccgtgcaggcgccacccacccacccacagcacctcgctcagacttcgccctccaccccgccgggacatttgggaagcctcaggcagccccacgcgggcacacccgatggtggacggaggctggcaccctcagcccgcacgcggccaacgtcaggcgcgcgcagaggcacccacgggcccgccttcaggggcgaggcggatgctgcatcctgaagccctccctgttacaagcccagcccctccaaaggcctctggatgaaggggaggatgaagggggagagaaggaggaggagggggagagggaaggaagggaagtgagggaaggaaggggaagaggggagggaggtaaagagagggagggaaggaaagggaggaaaagaaaagagcagagaggggagagggagggagggtgagtggaaaaggaggggtgaggaggaggagaggggatggtcccctcttggagggtgatgggggttgacaggtgggccccagcttgggttgcagcaatgactgaattcagggcccctactcagctactggcttcctgctgagggcactcggggagccccactgtcccacccggcgctccagggcagtggctactggtcttccgcagcagggtcttgcaggctgggctgagaccccccccccatgctccaccaccctcgtgtaggacaacccaggaacatgttagtcactgcacactcactcagccactgctatacctccgctctgtgctgggccacagaaagatctcaggccccacgaggctaaaaggaggaacagtggcccctgggagtcccagaggaggggccccgggctccgctgcggggggagggagggacttcctggggagaggccattgctcctgggcgttgaggaatgtgtaggagttctctggctggagtgacccaactttctactcttggccccagtttctccatttctcccctctccaggaagatcctgagagaaaacctgaggctcaaggccttccttgagggagggggaaacttcgtggttggaaggcaagtgtcgcccagagcccagctcctctcagggacccccagatgggagctgggagcctcttgttagccctgccgtattcattcaggacttttctggctagacccttccccacagcccaaccatgatcaagaccatcttacagttggggaaactgaggctaagatggtccaacaccaggcagggcccaagagggcagcaggtcagaccaccctcttgggccccggggtggttggctgtccccagcaacttttagaaaggcaggaagtgggatagagctggtgtgtgtgggccaaatcccaaggggtctgcaggaaacgccttcatccggaacttgagggtctccccccagtccagccccctttcccccgcatgagacacagcctacagcccccgccctttcctgggttggggcggggacggctgccctctgctggacacagcgggaacagcagggataactgagcgaaggggcggccacatccccgggacctccccgcccagagatttcctgatcccacctgcccagaaaagaaaacgacccttgttgatgctgggggcggcggcgcaggcccaggacggtgccctggggcgggaggctggatgctacagtaaagccaccatgactgcgtttgccgggctccctgtgcatgggctcagatgtgggcatggggtctccgtctcttctagttgatctctgatctcctcccagggccccggggacccccaggaaccagccccagatcctcctcatccttagattccaaaaagactgataaccgttggggagatgggatgggtggtgtacctggagtcctcagatcagagcctctcgggggtgattgctcctggaatcagggcctcagtccccagggtcctggaggaggtgcagggctggctgcatggagtgggcatcctgtcaggacccaaaccctcactcaatggggcccctggacagagcaggtgaattgttgtaaaaagaaggggtgtggcaggggtgacagggagagttgtgggattagacaaggggtgttggggtagcctcgcagggaaggagatacctgagcagagactagaaggagctgaggggggcgggaggggacttggggaagagcaaccaggcagagagaaccgtcgtgcaaaggagctgagtgagtgaggccagcgggggaggccagacagagaggcggctggtggtggatggggagagggaagcggctggaagagctcaggagcccaggaaggactggcctgcaccgggacatgcctgaagggggcgcactgtctttacaaaggaagggactgaggcctccaagggaatgggactcgcctggggtcccagagcaagcttgacagcctggccccgccccactcctccgccagcttggtggccaaggtctgtgttgggggccactctctatccccccgactacaggtcgggagctgctggtgatggaaccaggggctgagtatgcagtgctggccacatactaggagaatcccaggatggggttcagcagtgttgatgaggataatgaaggaaatcagggggaggtgaagaaaacagaggaagggggtgagtaaaagaaaggtcatggaggaggtgtggggaggtggaaggtggaggtgatggaggtggtgatgggggtggaaggtggagacgatggaggaggtggcggaggtagaggtggaggtggtggaggtggaggtggtggaggtggaggtggtggaggtgaaggtggaggaggtagaggtagaggtgctggaggtggaggtaatggaggtggaagtggaggtggaggtgatggtggaggtggtggaggtggaagtggaggtggaggtgacggtggaggtggtggagttgctggaggtggaggtggtggaagtggaggtggaggtgatggaggaggagatgctggaggtggaggtgatggagatggaggtggaggtcgtggcggtggaggtggtgaaggaagaggtgctggaggtggaggtgatggaggtggaggtggtgaaggaagaggtgatgaaggaggaggtggaggtgctggaggtggtggaggaggaggaggtgctggagttggaggtgatatggagggtgtgatgggatagcactgacattggtggtgcaggagtgatggtggaggagaggacggaggtggagacctcattggaggctggtggaggtcgcgtggcagaggtggcaatggtgggccctggcagcatgaggctggtggttggtaccagggccaagtccagggcttcacccccgtccccactctgaaccccatcagtccttctctccaagtctcagttttcacttctgcacaaggggtccataaccaccatggcctctgggttggcacaggggtggcctttaggattggtgtgggggtgaacctgatgttgggtggggtgctggcgggggtcaggtggcggtggtgatgggtaggggatgcacagagggggcatccaggcggcccccctactccaactcacacctctgtcagcggctgtgggggatgggagcaatgacaaagctgctcgcggtaaacagctccgactggatcgatctgggctgtgaggagctgtaattagattgaacgccgggaaggggggcagcagagcctctttttgctgcaatcgacaaaacgggaagttttttcagactctgcctggcccggcccctcccccagcctctgcctctggggtccccattaggcaccagattggagcctgggaggtggggtgggaaagggacgatatgcatcctacctccctcccccatctaggccagtggactctgttttctgggctgccctattgggactggctgggcaagcctgaggggtggctcacattctctgagtaaataaggagaaaaccccctgccttgtagaattattgtaaggattgaggctgggtactgtgattcatgcctgtaaccccagcactttgggaagctgaagctagaggattgcttgaacccaggagttagagaccagcctggacaacatagtgagaccacatttctacaaacaaacaaaaaacatatatatatgtttgtgggggttttttgttttttgttttttaattagccagatgtggtgatgtgcacccgtggtcccacctacttgggaggctgaggtggaaggattgcttgagcccaggagttcaaggatgcagtgagtcatgattgcaccactgcactccagcctgggcgacacagcaagaccctgtctcaaaacaaaacaagaattattgttaagaattgagtgaccagatacatataaagctcttgacacaaagctcttgtgagctttctgaggagcatttgtatttctgtccctactgtaaatgtaggataaatttgtgagtaaattgctaagtgaatgaataaatgagtgagtgaatgaattaaacattacaacaggtgagcgagaagggcctcccttggaatttcaaggccccggttgagttttgactcagctttccctttgaaagaatggaggactgggtcctctcctgtaatcctcatagggtggccgagtgccaaagaggtgagaggtcaattcagttttttgcatttccttccatgtttctttatgcagataaaatataaacataggttcttgtctctcctttcacacataaaaggctccctggtacactgttcacccttcaggatttcctttgccatctttccagattcatacccatactctccctctctgtcagtctctcaatataattacaaatacagtctgttgcctaaattaacatttagtaattaacattattacgcttttggaaaacattgtccacagctgagccatgtagagtactaggactgcatttcctttcctgtacaactctttggttttccaggagttgatagctgccaaacaaaaattcttcccacgctccccaacaaaatttaaaaccaactcaataggactttccacacatattaggtcatctctgatctgggtggggctgccctccataccctgggtccttttgtctagctgtcttccagggtccccctcatcctgatttggaggaccccttttctctttcagctaggttggatcacattttctgaatcccacaccatcctttttttatttacctcctcgtttgaatggaacacatcctccagtagctttctgagaaagggtatgtgggaagttaagttttggagtccttgaacatccgattatatctttattgcaccttcatgtttggtcttttgttatttagcaattctagctgaaaataacttttccttggaactttgaaagccttgctctgttgtctgctagtttttgcacacccaaagctgcttggattcttgatcctttgcatgacatctggctttcctctaggcgctttttaggattttctctttattcttggtgctctgaaatttcacaacaacgaggcttgagtgtctttttcattcaatgagctgaggacttgatgtcccacccccatttttttagagctggggtctcgctctgtcatccaggctggagtgcagtatcatgatcataactcactgcagccttgaccttctgggctcaaatgatcctcctacctcagcatcctgaataactgggaccacaggtgtgagtcaccatgcctggctaattttaaattttttgtagcaatggggtctcactatattctccaagctgctctcaacctcttgggctcaagtgatcctcccacctcagcctcccaaagtgctgggattagaggcatgagccacttcatccagcctatttagttattatttatttatttatttatttatttatttatttatttatttttgagacggagtctcgctctgttgcccaggctggagtgagtggtgtgatctcagctcacacctctgcttactgggttcaagcgactctcctgcctcagcctccccagtagctgggattccaagcacctgccaccacactcagctaattttttttgtattttttgtggagacagagtttcatcatgttgaccaggctggtctcgaactcctgacctcaagcgatccacctaccttggcctcccaaagtgctgggattacaagaatgagccaccatgcccagtgggcctatttatatttaaaaattatttattttaaaagagagtcttactctgtcacccaggctggagtgcagtggtgagatcatgctcactgtagccttgaacccccagcctcaagtgttcctcctgcctcagcctcccaaaatgctgagattacaggcatgagccactgcacctgaccacatttaaactggaaactcatctttcaacgctagattttttttcattatttgatcatctcttcctctatttttgaactgtctcttgatcaggtgacaaccctgcttcatcttaattcatcctctaactttttattctctttcatttcccatctttgcagctgcttgtgttccattttctgggatatctgctttactcttttttttttttttttttttttttgagatggagtttcactcttgttgcccaggctgaaatgcaatggcacgatcttggctcaccacaacttctgcctcccagattcaagcaattctcctgcctcagcctcccgagtagctgggattacaggcatgcaccaccacgtccagctaattttttttttttttttttttttttagtagagacagggtttcaccgtgttagccaggatggtcttgatctcctgacctcgtgatccgcccgcctcggcctcccaaagtgctgggattacaggcgtgagccaccgcgcccggccaatatctgcttaactttatcttccagtccttacatggaattattttactctggctgttatatattcacattttaagagcatttcctcactctctaatggtcccttttacttaacagcatcctgtacttgtttcatggatacgatatttttctcttactcctctgggaatattaattatagctttgcctgccttgtcggttccttctgagtttattcctcccccaccaaaccatttttctccattgttctcccccctcctgcctccctccctctctctctctccctctctttttcatgttagacgcttttctaaaatgtgcagtaacccacaggcatcacttgcatttaatcataaaacctgaaaccgcagttagaagccccacacattccaggtcagagggagtgaagtgtgcgtcagctcacaccctagacgggtgaacctgttgtccccgagacatgagtcatggcagaaggaacattcatttatttctgtggacgtgtatggacattgatctagcatgtcatgttccaggctgttctgcaacgaaaagaaaagctctctgtgccattccagtaggccacgacggctggcacagagaagagactgggagcagagacccactagtactacctgcaccaccggccacttctgggggtcacagagtagctggaactccgggatggagacaagggcaggacagcctcttcagcaccacagtcccagtctggatgcaggagagaaattgagattctgatggagtttcaagctgatgccacaaatgagcccatctgacttgtggcccagctcctagtgggggaagcctgtgttttgtacccactgacacccactgcattgaggggaggggttcacttcgctgctggagcaggaagagcaggactcggcttcagccctgccccatcaccccgagcctttgcttttctcccctttgcaagtgtctggtctgcaggccatggggcagcctccttcagccctctccgtgatctgtgcgggctgaccaagaggaagggtgacctgctcatctgggagaggaagaggtggtccctgcactctcccctcctcctccaaagtcttctttcttagatgttctgcgctccagagggtccactgggtgctcgagggaggccaagtctgggtggtctcagcctgtggataggggcaggagcaggaggcagggattcagatgtcggaattgggctgtggactcacagggtccctaagggtatcaggccttacaggagtgtcgctgctgctcattcgtagagcttggttgtcacagccagttgccatggcacacacctgtaatcccagtgctttgggaggctgaggccagaggatcacttgaggccaggcgttcgagaccagcctgggcaacatagcaagacttcccctccgcaaaaaaaaaaaagaaaagaaagaaaggaaaggccctggttagcccaccatttctggggaaggctgctgggttttgtgatgcaccccaggacctagtaattaaccagttatttcacccaagtctacactgagccaaaaactctcatgtgcagtttccatgtcatttccccaacacccccaggttggggctgcagaaaggagaggagaaagttaccaatatcaatttctgtggtcctttaggtagggagcgtttgagggtaggacggggtttggggggtatgaggcttggggggtgcctgagtgggctccatggagaagggggctggagggggtggtagccatgcctgcagaggggcactcacactgtgtccccttctttgtcctccccccacccccaccgcatctgctttccctgcctgtcctcgccttccattctgtctccaccgccctctggctgcatcctggactttcctgttgtctccctgttgaccttgctgtttccctgtctctgtctctgtgcgtccctgtgttccccgctgtctccccctccgcctctccctgcattcttgttgcttctgggctctccctgggaccttatgtgcattcgcctttccccaacgtgtcccttctcccctcctcctcatcctccgggcggcgtgcgcctcctgcctctccccggccggccacacggtggcgctgtgtcccgctcgcccgcccgcccgccgctcgcccgcagcctgcaagcgcaaggaacaggagcagcagaaggagcgcgccctgcagcccaagaagcagcgcctggtgttcaccgacctgcagcgacgcacgctgatcgccatcttcaaggagaacaagcggccgtccaaggagatgcaggtcaccatctcgcagcagctcggcttggagctcaacaccgtcagcaacttcttcatgaacgcgcggcgccgctgcatgaaccgctgggctgaggagcccagcacggcccccgggggccccgccggcgccacggccactttctccaaggcctgaggcgccccggccccgcgccctccctgcctccacggcctgggcgctgtgcccccacgtcacctccccacatcctgccggcccggagacccgcccccagggggcacctggagggggtgctatccgggccccccacacccggggagggggaagcagcacaccccccagcccaagtgcacaaaaagggccccccttcctccctccatgcccactccctccaggccaaaggaagccctccacccccccccggaggggagggagtgacagaaaggggtttcccagccccctctccattcaggacgcccagagggcctcgagaaaaaccagggctcactgtgttgtcccctaaagcgggtcaagaagcacatactagaaatataaaccgggtatttaaaaatggaattttaaagaataacccctcctccgtcagatcccctgccccaccgagggaggtagtagaaaacttccttcctccccacccgccccggccccctccccagggacctcagccctttccaaagtcgccaaaaacccacatcaagccggatccttacggtcccccaccctctccaaaaccaaccccacccgctggcaggacggcccctgcggccgagaactgagctgcccctctctgcggccaggattcctcgtgccaagaatcgcctgccttaaagtctggggaggggcctgcggcgggcgcccagcacctacgggcgagcacccttcccaccccatcccaggccgcaggggacggggggctcccacgtgcgggtaaattccagacgcccccgccccgccccgtctgttgagttcactttacctttaggcaccttcgtggagcgcaaggaaggacgcagctccggacacgggagaccacgcccaggctcccaggagaaggggacccggccggagaaggcgccgctggggccgcccggaggagcccctctgcacgggcccgtggagacgcttcctgcgtggaaccttctggaatccaccgcccccctttccgcccgcgtcagggtctgaactgggcttgcaggggggcagcggggttgaacgtggtgttggtttccactctcgccaaagagagaagacgccgaggaaggtggattccgcttgctccattttttgccaaaaatatttacaaatgggaagggtcggaaatgaagatgagcgcccccctcccaccccgcgctctcccccgctcctctcatctggtctgggtgacctccgagactggccggccgcgggatcccaggagcccgcctcctccgggggttcaagatccgagtctagaaggaacctcctccctgaaatccccccactcatcggctgcctcccagggaggaggcggcccccctaccccccttgaaaatgcaaaagacatttctagtgaaatgcccctcccctcccccaggtaaaggctacctcactcaagctcatgtctgtgattggaaaatcacgcctgataccaaagatttctcccaaggatttgtgctggatgacaggattccctggcctgggacccggctcggggccccgcctgccgagtgccaccccttcccgaacctgagagcgaaagagagagagagagagagggagagagagggagagaaagggagagagggagggagaggatcgtgaggtcgaagagtgccttcttcttgaaccaaagacgtgtatggagtgttctcttgtccttatcgacttgctctgctcccagctttccaagcgaccggatctgagtgatgcttctagaacatttgggtgttggggggttcccaatagtagaaagggtccccattcctgctcagcaccgcacctctctacccccccacagacacacatgcagacacacacatgcagacaacacgcagacacacacatgcaggcactcacatgcaggcccatgcacacacacgtgcacacacatgcagagacatgcagacacgcaggcacacatgcacacatgcaaagacacgcatgcaggcacacgcagacgcacacagagacacacatgcagatacacatgcacacacacatacacacactggcccctgtttttctgtggtgtcactgggtgccagcaactcggtatctcccacctcccactaaaacctgggccttaatttctctcccgtccccacccctaaattcctgatggatgaacctagagctgtcctgtccactccaggccggactgacgtagcctatgggcccagcaggtccagggcccacgttttaatttctttttaaaaagctttaggtcttgccgggcgcggtggttcacgcctggaatcccagcattttgggaggccgaggcgggtggatcacaaggtcagcagttcaagaccagcctgaccaacatggtgaaaccctgtctctactaaaaatacaaaaaaattagctgggcgaggtggcaggcacctgtaatcccagccacctgggaggctgaggcaggagaatctcttgaaactggaaggcagaggttgcagtgagccgagattgcgccactacactctagcctgggcaacgagagcaaaactccctctcaaaaaaaaaaaaaaaaaaaaaaactttaggtccaagaagatgcaccccattcaacataccatattatttgtctttataccaaggtagcctatagatatacaatgttttaaatttcttttttagaaacagggttttgctctgttacccaggctggagtgcagtggtgcaatcgtagctcactgcagcctcgaccacctgggctcaagtgatcctcctgcctcagcctcccagtagctggggccacaagcacaccccaccatgcccatttaattttttaagggatttcttgtagatatggggtctcactatgctgcccaggctggtcttgaactcctggccccaagggggtcctcctgcctcggcctccaaaagtgctaggattacaggtagatagacatttagtggaggaagaggctctcaaaggcaataaaatgcttctgatccaagagaatcacgctgcagccctggcccagtgagcttcttagaaaatcgatgcctgggcttcaggcactggccggagcacgggcctggcggggtgctgggtctcctagatgccctctgcttggccttcaaggccccaagggtaacacgctagggggcctccagttttgtcccctgctggaaatttaggacttggcttgggatcgttctggttgtggaatgttttagctatgctgaactgtggtcagatcaggtcaagcctcttggtcacagaagtggcccagcagcactttgggaggccgagacaggaggatcgcttgaggccaggagtttgagaccagcctgggcaacacagcaagaccccacttctacaaaaaaaaataaataaagtggcccaggactcctggatccttttcagatatcttcgtatcacacacacacacacacacacacacacacacacacacacacacacacccctacctgtttccggaccccaccccaaacttggccagacccccacagaaggctctatccccgacctgcccgccggcccctcaggccctctcctgcctccccgcatgcccacttggctgtcacataccaaagagcatgcgttctccatgcagggatcaacacctccagcacaattccttcgagcctttgacaattttctctgaaatacctcaaaatatttaatgtatagtttatgtgattaaaaaaaaatccttagctagtttttggaatacgtgacttgaagctttataccgttaaattataattttgcagacgatggcatgtcgtttctttgacgagttccgtgggagacgcattgaatgtcagggctggagaccagagggaaagttagagggagcgtgatcgcgagagagactgcggcagaaaggaccagtggcgtttacagatttcttatttaaatgagtcctttaggaaagaaaggaagagagagagagagcgagcgcaagagagagagagagggagagagagggagagggagagagagaggcagaggtatacctttctgttctctggcttgttctgtttcttgttttctggagtcatgtcttataagagtatttattattctctgtgttctgtgttcaaatgtaatttaagaaaaaaaaaggaagaaaaatgcaaaaaaaaaagacaaaatggaatttgagttggtgcatgactaatgtactctttcttgacgctaattgtaataaagtggtcagggtggggggcggggggcgtggcccggttccgtgtcgcatctgtgtgtctggtgcctgatcggtgctgttcagtggtttttcgttactgtttctttcctcctttctaaggaactgtgtccagccgggacaggtggacggggccccaggtagagggggcgggaacagagcctcagtagccgggtctcctccacctgcctgtccatctccacccgagatgccacctgcctgccccagccaggcgggagccaccgagcgtccccccctcagttcctggttcttgggggcactctggtgtcatcgatatcttagacccccccaaccccccatcacccggttgctttcactctagcatgaattcccaagtgtcttgttcagaggagacagacaatcagcctattcttgtcttgttgcccagggtggtgggggacgggagtgtgccccaacttcctgagatctgaaggaccctcctgagggccccaacagcaggcaccagcaccccctccccccccacctccacccagacagcctcggcctccctccctgggctgggcatgagtccgcctttctgtccagcccgggaggcagggggtgtacgcctgcagagacccctccctcccagcccactttcggagcctacagaacagaggactccccaaaatcatcaaagggggctctgggacaatgtcctctgcctctgactcctcttgtgccatgaggccacgtccctgagccatccccagatagtccctggaggtggaaaggggcacagatgtgccagcttgggaacagaggctggaggagagggcggcaggggagagatgagaggggccgcttttgggacaggccccagtaggggggggcggggtagctaaacggggtgcttctcaccccataaagcagcaagccctggtctggagggctgggcctggggctgagggctcagctgacctcaaatctgaaatgatgccggggccaggatgctccttgcaccagcaggagcttgggccatttcacattctctgccccaagcggtttaagcaaaatcaggccagtagactcctggggctcctcctcgtggccctgtcagaccacgcaggggctggttttggtggaatgagctcagccgggggtgacggaagagccaggaggccctgcggccttgagtgttttgaatagactggaactgagggctgctttcaggggagacaccacttggaccctccaaagtcccctcccctccagggacaggggagagaagcccttttccaccttcacccttgggcgacaggcttaaaagctaaaaaaaaaaaaaaatctcgtcattgttaaccattgctgtgctgggtttgttgatttgtttttcttcaataaattattttctagtcactcacctgggcgtgtgtgttagctgacgggtcgggcacagatagggggcgggaatggaactcgcccacctcgaggctggggagggaggaccggagtgcagggaagacggactttgcttccacccagctcgcccctctctgctctgagtcccgtcttcttcctgggccagtggccagctctgagcctccacaatccacacaactccaccacccacacaagtccaccacccacagggaatggtaagaatcagaaagaggccaggcgcggtggctcacacctgtaatcccagcactttgggaggccaaggcaggcggatcacgaggtcaggagatcaagaccatcctggctaacacggtgaaaccccgtctctactaaaaaatacaaaaaattagccaggcatggtggtgggcgcctgtattcccagctactcaggaggctgaggcaggagaatgctgtgaacccggaaggtggagcttgcagtgagccgagatcgcgccactgcactccagcctgggcgacagagtgagactccgtctcaaaaaaaaaaaaaaaaaaagaatcagaaagaaaagcttggcgccttagaaggaaaagcttggcgcctttgagtcaaccaagccccaagatgcacaccttgtcaggacctgcttctgtgacatcactgctcattgctttctggagtctaaagtgaacggaggccccagtgaatgaaggtgtatttgaatgggagaaaccagggcttcccgatagaggaagaagctagatggtacaagaactggaatttataaactttcttgggaggggccagctgtcaggcagcgggggagccacagcttttaataagcaacttttgagagcaatgaagctttacccacattatcttaccccagcatgaagaaggaaagttttccctgcaaatacccggctggaccactagaggtcagtgttttgattttaaaaaccgggaaggaatattccatcacaaaaaaagtgtagggaaagagggagcctgaattagcgctggggtcagatggaccctggtttattagaaaaagaaaagcatgtggagtccttgtctttagaggaaggccccctgcatgctggttgacttgcagcagaactggctggagcttcttcttcccaggaaggacatcttcctgatatgccagcgtgactcctttgggctcgaagatgcctcttcatcagatgggtctagggattcagatgctacgtcactgctgaaccctggtcccctccgcagagggcaatgactgctcctctgggggcaaggatagctgctcctccccgggcaccagcagccactccatggatgatgatgactgcttctccgcgggccacagctccacctccataggctgctcgctcgtggacgtggacgattcttccagacttggtggcagagtctccacctgagatttgtgggtcttgtctggaagtggcaccgtcccctccttgggggtgtgaggctccttttgccagctcttccggaacggtgtggagggcttcaaaaatgctgacttctcctccgaggagtctggctggctctccaacgtcagctggcctgaaagaaatgactggctccccagaggctgtggctggctctcaaatgacgacagctggctttctctgtgcaacagtgatttctcctgaaaagaatgtgacctctccttggtcaacagcaacttctcaggagaaggtggcctctgcttgggtgacaatgacctctcctgtgcccttggcaattgctcttggaaagactcagatagcctgttgctgctggtgagcacatatttggggagggcaggttggttttctggatgaagagcggattgtctatccatagaaaatgatgagctaggtgtaggggggagctgtacttcctgggaggacacctgcccctgtggctggtgcttcttcttccccaggaaggacatcttcctgaggtgtcactgtgactcttttgggctcgaagctgcctcttcatcagatgggtctagggattcagatgctatgtcactgctgacccctggtcccctccgcagaattgtgccctgagtgatgaggtttgcatatccctcacggtgggagaaagcatagctggaacggcgggcacgagactcccggtgtacatgaggcaagggctccatggtgaaaatctcctcgctggggccctcctccaccttctcctcctgaagagcaaaggggagagcaggggaagcagactcctatgcttggctgatggctctcaggtcccccaagtaggagaggcaggattcaaagcccttggccactattgattggctacgttcttccctacccaagttgagccaattagagtcctcgactctcagtgttgagttctaaggaggactctagtcctttgcttttcaagacccactaattggccttgccctggaaactaaccctggatcagccaatcagagttattccctgggacttaactcgggaccacccaatcagagtccttccctgggacttaaccctggctcagccaatcagagtccttccccgactctggaccagccaccaggtgccttggctgccctttggtggcaaatccaggagaggtgagcctgggacagccaggtgcccagcctgtgcagtaaaggtggcaggagctgggcagggagaacagaggtggcagggcaggtacaccattccagtcaattctggggcccatctcagctgcaacttgcttttccatgcatgctttggttacgtgggctagtaagtcccctcccttttttttgaggtggggtcttgctctgttgcccagataggagtgcagtggcaaaaatcatagctcactgcagcctcaacctcccaggctcaagcaagccacctgcttcagcctctcaaagtgctgggattacaggtgtgaaccgctgcgcctggccttgagcacatgtcctcaaggtgcatccacgctgtggcctgtgtcagagcctcactccttctcacggctcaggcgtgtttcattgcacagatggagcgtgccgtgttgacccactcatctgtcaacagactcttatttctaagttcctccttttgcctaaaccatttcaaggttgtttccgtcatctcaacccccaagctctagatcattcacggtagaatctgatggtgtcagccaggcacagtgtggctcatgcctgaaatcccaacatgttatgaggccaaggcaggaggattgcgtgagcccaggagtttgaaccagcctgggcaccataatgagtctccatctctagaaaataactacaaaattagctgggcgtggtggtacatgcccgtggtctcagctacttggaaagctgaggtgggaggatcctttgagcccggaaggtcgaggctgcagtgagccgagattgtgccactgcactccagcctgggtgacagcacaagacccttctcaaaaagtaaaaataaataaataaataaaaccttaagagcccgatggcatcagcactggaatccagggcggcgtttgggtgctctctgctgctttgtcgggggagtgaggtctcccttcttgggaaatcgggccccgggggcactgggcgtgtgtccggggctccgcacccacccttcccccaagcctagtgtcttggagggccgagaggggccgggacaccttgcagtccctacgccctgcacggctccccaaccagggtcctggaatgtaccagatgaggaccccaggcccaggcccacctcaccttggcacgtagctccttgagggctgggaagatgactcggagggccaggacagggaaggtgtttatggacacactcagcaggaccaccagcaggatggagggagaggacatcacgctgaggtcggcatctggggacagggcggggtcacagcagagcctacccccagctccaaggatgcccccaggctagggagcgccttggtgcctttgtgcctggtccataaaggagcgccttccccaggacactttgccggacgactgtcatgagcaacctgcaacctcttccatcggggctcccctgcaccacgaccgcccgtcccacttccccatgggggctcacacagaaacgggaaggtcgtgggggatactctgaagagccagaagctctgggtggtggtagtcatgatggcgtagaaaccaaggctgaggaggatggtcgccacgcacagggcggtccagtacttgatgataagaatgacctggacaggcagcggtggggtaaatccggggcctagcggggcttgcaccaggacaccagcccctggggtccaggaagggcacctggcaatgcccccaaagcaggggtccccaggggaggaggcctccataggccatgtccaaggccccggggaggtgaggaccttgcccacctccatggtgatggacagcaggcaagacagggccaccacgaccgcaaaggactggtggtcgctgaagctggcgggtcccgccgtgtcgcggctgatccacagtgtcatgaagaagttgaccagagaggtggtcacaccatgggcgatggcttggacgaagacccagtagttgaagagctcgtccttctgccccaccacgtacagctccggcttctccaggctctgctctgcgctcacgtccttggggcaagcagaagctcttgggattgggtggggggcgggggacacccaacagagatcaggatctcctcgggcaggccagtagggtggccactctctgtgtgtggctctttgagtttaagtgagttaaaataaagtaaggccaggcacggtggcacacgcctgtaatctcagcactttaggaggtcaaggtgggaggatcgcttaaggccaggagtttgagaccagcctggacaacatagtgaaaccccccatctccaaaaaaaccttttaaaggagctgggtgtggtggtgcgcacctgtaatcccatctacttgggcggctgaggcaggaggatcatttgagcccaggagtggaggctgcagtgagctgtgatcgcaccactgcactccagcctgggtgagagaatgggacctcgtctacagaataaaataaaatgaaatggaaagagctctggaggttggtcacttggccacacgaacgcactaggtgatgctgggctgtgcgcatgagtctggctgagacggggcagtttacgtgatttgtattccaccacagttaaagataccagcaaggccaggtgcggtggctcacgcctgtaatcccagcacttggggaggccgaggtgggaggatcacctgaggtcaggagttcaagaccagcctggccaacatggcgaaatcctgtctctactaaaaataaaaaaattagccgggcatggtggtgcacgcctgtaatcccagctactcaggaggctgaggcaggagaatcgcttgaacccgggaggcagaggttgcagtgagctgagattgtgccactgcactccagcctgggcgacagagcgagaccctgtctcaaaaaaaaaaaaaaaaagattctagcaaacatgaaatgagatgtaaaatccagtccctgggtcacaccagccgcaacacaagcgttcctcatgggcacgtatggctgctggcttctgtgttggattgcatagctgtgggacacttccatcatctggaacgttccatgtgacccaccctcccaaccccagatcacgtagccagggcctcttggagctgggggatgataaacctagcagagtcatctgctctgatcctctctccccattgcatggatgggtagacagaggcacgggggctccagcacagggtgggggctcccacacacaggaggagctggatggccccgggatgagcgtaggctccggtgggagaaggtcaatggcagtgggcagggagaggtactggactgcaccccctgagccccaccccatggcctgaaggtctcccaggctccctctccccgccccaaggagcggaggagaggaggagaggctaagcagagacctggaaggaagacccggccttgccctgctcacctgctcaaagagcccaatgtagagaactggcagggtgctgtacaggaggttgaaaagagccaggaaccatccttcatacaggggctgagccgggggagaagggcaaggagaacaagtcagcctccaggcacccaaggagcctgccaagcaggcacccagggagggttctgggtgaggtaactctggtcgagttacactcaaggttggggctgggactggggtggggtgaagtgcggcctgataaaggcggcaagataaagggagggaggaaagcatgatcaaattccctcataatggcacctctgagtttttgttttaattggatggcatcaaaaaaggatacaggctgggcacggtggctcacgcctataatctcagcactttggaaggccgaggcgggcagatcacttgaggtcaggagtttgatactagcctggccaacacggtgaaaccccgtctctactaaaaatataaaaagtagctgggcgtggtagcaggcgcctgtaatcccagctacttgggaggctgagacaggagaatcgcttgaacccaggagacggaggttgcagtgagccgagatcacactattgcactccagcctgggcaacaagtgtgaaactctgtctaaaaaaaaaaaaaaaaaaaaaaaaaaaaaaaaacgctgggtgcgattgctcatgcctgtaatcccagcactttgggaggctgagatgggcagatcacgaggtcaggagttcgagaccagcctggccaacatggcaaaaccctgtctctactaaaaatataaaaattagccaggcatggtggcaggtgtctgtaatctcagccactagaggggctgaggcaggaggatcacttgaacccgggaggcagaggttgcagtgagccaagatcatgccactgcacgacagcctgggcaacagagtgagactctgtctcaaaaggtaataataataaaaataaaacagaaaccaatatatacttactaaggggtttctgtaaagctccctctcaaatgcccaggtattagtgatgggagctcattccttctccaaggcacctgcttcccagcagtttccctacacgcagggaatagcactgccctggggctcctctagtccttgtcaggataccgctcagagtctggaccagagccccagctcccacaatcggatcttctctggggttcaaggtcttgttcactcaactctccccagaagaggaggtccatgtgcagtgcctgcccttgcttgaaagctctgagtgtgccgggcacggtggctcacgctgtaatcccagcactttgggaggccaaagtgagcaggtcacctgaggtcaggagttcgagaccagcctggccaacatggtgaaaccctgtctctgctaaaaatacaaaaattagccaggcgtgatggtacacgcctgtaatcccagctacttgggaggtggaggcaagagaatcacttgaacccgggaggcggaggctgcagtgagccgagatcgtgccattgcactccagcctgggtgacagagtgagactctgtctcaaaacaaaacaaaacgaaacaaatatcctggaaggtgttgggcacagagctagacagggaccgtcacctcccttcacctggactctaggcctccactaacgcagccttgccatgtggcctcaggcaagccctgtccaccgaggatcccagggttctcagtgcgtccagggctgctcctggcagctatgggaggggcagggcatccccagaggccctggtcatggggcagccagggtgggggacgcacctggccggtgaagccgttgtagcaggcaaaccagacctgcaccatcatgctggccatgctcttgtagaagaagtagcgcaggaacttgcagatccgcacgtaggaccagcggccgtgcaccagcaggaggcgctgcaggaagcagaactggccgagcacgaagtcgctgttctgaactgcctgcatgccctcctggcccgccagccccacgcccacgtccgcggctgcagggcacaagcagctggtcagccccccgcacgcccccagtcccgcccgcccccccagacccccgcactgttctgccccctatcagccccccccatctgcttcaggtccccccagtcccaccgccgcctccatcagcgcccccctcacctgccccaggtccccccagtcccaccaccgcctccgtcagccgccccccactcgtcccaggcacccccagccccgccgccgccacccactcttgatcatgttgatgtcgttggcaccgtccccgatggccagggtcaccacctggtggtacttcttgaccagggccacgatcagggccttctgcttgggcgtcacgcggcagcagatgaccgcctggcacttggacgccaggtccacgaaggcgcgctcctgcagcacctcggagctacggcgggctctggagtcctgggctggcggtgcagccagcgggagcccgaacctccggcacagcagggacaggcgcctggcgtagaggaaatccctcctggactggccgagctcctgccacgcctcgtccatgttcacgttctgcgccagggcgcgcggctccttccgcagggacaccagcagtttgtcctggccggcggggagggggctgtgccaggcgccgtggcctccaggccagactggaccctacccggccctcggcctcgccagcagtccccaccccgagcccgccgcccctccaggcccctccctggcgccgggaccccgccgtccaccctgagcgacactgaccaggaagtctccgttaatgaccaaggccagcttgacctgcgacagggactccctggttagaaggttgttactgttttcccagtaggtctccaggatgcggctgcggggcgcaggggtcagcggggcaggggagggggcgggcttctccccacttccccgggggctccactgcccctcccaccccttccactgcccactcccccacccctgccccttctcctccccacttccctcttcccctcccctttcctcctcctcccgccgctgcccctccccttcccctccactgcccactcccccacccctgcccctcccccttccctctctcctcccctctgcctcctctctcctcccctccccctccaccgcccactcccctccgctgctcccccctcccctccctctcccctccccctccctccactgcccctcccctcctccccactgcccccatccttcccctccactgcccactccctcacccctgcacctccccctcccctcccttccctctcccctcccctctcccctcccctcccttccctctcccctaccctctccctccactgcccacttcgccacccctgcccctccccctgccctcaccttccctccctcttccccctccctcctctgctcctccccctcctctgcctctccccttctccctccactgcccctcccccttccctccaagctccctccactccccattaccacactccttcctcctacccttccctcccctctcaatcccccccttcccactgtgccttgggctccccgtccagtgagacacgcacctgggtgctccttgtcctcacctccccactccccttgctcaccccccaactccccacttcttacctaatctccttctcctccagaatgagcatattctctgacagcagctcgcaggcgaagccgatgttcacagccgtttctgcgaagcagaccagctcagcgcctctgcgacccgccccgcactggctgcctgggggccacgcccactctgcccggtgaatcctggcccgaccaatggcagccacatgccccaccccctggccatggtgattggttcagagaagggcttgtaacccaggctcaccaatgagagccagccctgagattttggctgtagttctggccgggactgggctgcccagagatgtgtctgaggccaggatcagcaggcacatgtgcctaggatccacagtgccttcaggaacccacaaaatgtctcaatatctttttaaatcagaagggaaataattgaatatgtttccctgggctggctcctggccgacagagggcaccctgaaaatcactttttttttttttgacaagggctcactctgtcacccaggctggagggcagtggcgcaatcacggctcactgcagcctcaacctcctgggcataagcgagcctcctgcctcgtttctctggagtagctgagaccacaagcatgtgccactgcgctcctctgagagttgcagcattttttttttttttttgagacagagtctcgctctgtcgcccaggctggagtgcaatggtgcgatcttggctcactgcaacctctgcctcccaggttcaagcgattctcctgcctcagcctcctgagtagctgggattacagatgcgcaccaccacacctggccaggcccatttttgtatttttagcagagacggggtttgaccatgttggccctgctggtctcgaacttctgacctcaagtgatccgcccgcctcggcctcccaaagtgctgggatgacaggtgtgagccttcaaacttcagggaagtttgaagacccatgctgcaggggcttagccacccggagctgcccgggactcaccctgcttgtccccggtgagcacccatattttgatgttgctcttcttgagacatttgatggtttcagggacaccgtcctggagtctgtcctcgatggctgtggctcccagcagctggtgggggaggagggcagggcggggaagatgctgagcagccgtccagctccctggcgggggcaggagagtcccagggcccccttgggtgcccccgctgcccacccaccctgaggtcctgctccatctcgttgtacacctgttgcagggcctgtgcccggttctgcagcaggaggctggcctcctggtggcgctgctgccagtcctcgtaaatgtcctcagccacctccctgtaggccaggcacagtgtccgcagggtctcctgggcaaaggcctgggggccgggcaggtggaagctgtcaccatgctgaagccgacatccgaggctcagccctccccaaccccctgccgggctccggagcctgggtcccccaaccaaaagcctgttgcctccccagccaacagcagccagaagggattcagaaaactggtctgaggccgggtacggtggctcacgcctgcaatcccagcactttgggaggctgaggcaggcggatcatttgaggccaggagtttgagaccaggttggccaacatggtgaaaccctgtctctacccaaaatacaaagattagccaggcatggtggtgggtgcctgtagtcccagctacttgagaggctgaggcaggagaattgcttgaacttgggaggcggaggttgcagcgagctgagatcacaccactgcactccagcctgggcgacaaagtgagactccatctcaaaaaaaaaaaaaaaaatagaaaaaacaatagaaagaaagcggggaagagggctgggcgtggtggctcacacctgtaatcccagcactttgggaggccgaggcaggcggatcacttgaggccaggagtttgagaccagcttaaccaatacggtgaaaccgcgtctccactcgaaacacataaaaaattagccaggtgtggtggcgcatgcctggaatcccagctactcaggaggctgaggtgggaggatccctcgaacctgggaggccgaggttgcagtgagctgagatcgccctatcgcactccagcctgagtatcagagcaagattctgtttcaaaaaaaaaaaaaaagaaaagaaaactgagctgcccctgctccccacctactctgtctcagacacctgctcccacccccagaccctcagctctcttttgcctccagaccttcttggaggactgtttccctgccaggaacaccttccctatgctttgcacagcaaattctttttttttttttttctcgggggtgggggatagggtctcactttgtcacccaggctggagtgcagtggcccaatcatagctcactgcagcctcgaactcctgggctcaagtgattctcctgtctctaccttccaaatagctgggatcataggcacatgccatcacacccggctaatttctttgtatatatatatattttttaaatagaggtggtttcaccatgttgcctgggctggtctcgaactccagagctcaagcaagctgcacacctgagcctcaaaacgctgagattacaggcagaagccaccacacctggcctgcatggcgaattctgactatcactcaagaccttctatgcagtccacccacccggtgccttccccagctggggctcccccagtcccaggcccctccctctgacccctcaactttggctctctgagccccttccttgggcccctcatttctcaagggccagacccagggttggggcctctaggggctgggaggaaactgggcaggcccagagagcaggcaccccaagggtggtcggggggtccccaaggaaggtgcccttacggcttcttaccccccgaccctgcccccagctttgtgctccaaggggtggccttaggtctcaaatttgtttatttatttatttttatttatttattttttgagatggagtctcactctgttgcccaggctggagtgtagtggcgcgatcttggctcactgcaagctctgcctcccgggttcaagcgattctcctgcctcagcctcccgagtagctgagactacaggcctgcaccaccacatctggctgattttgtagttttagtagagacagggtttcaccaggttggtcaggctggcctcgaactcctgacctcaaataatctgcccgcctcccaaagcactgggattacaggcgtgagccatcgcgccagcctgtttattaagagacaggggtctcgccctgtcgcccaggctggagtgcagtggtgcgatcacagcttgctgtagcctccacctcctgcactcaagcgatcctcctgcctcaggctcccaaagtgctgggaccacaggcacgcgccaccatgtctgatttcccttttgttgttgatggggcacgggtccaagagcttgggcttgacacagcagaggagcttcacggacattggcagcctccgacaggccttgacccttcttccggcctcaatttacccatccattccctggggtggctgagctaagctgacctgctgagctcctgggctctaggtcattattgtgaccgcacttccagttcagagtgcccccacatcctggcagagcaggggacacaggacatcttcccacacacaccccgctgccctgtgctccatgctgctggggccccagcagaacctgtgaggagcccccaggctggacgcagaatcctctggccctgtagggtcagggctggaccagggggaggcagcctggggtgatgacagccccatgttggcagggggtggggcaggaaaggccccatgtgtggggagcttgtggctgagtcatgaggacaccgaaagcttctgaatgacaaaggtgcagggaagaccctcccagcacaggaaacagcatgtgcaaaggtgccaaggcagcacctgagagtggggaagtcacaagccagaaactgggtcctagggagtcccttggtgaggccaaagagagaccaggctggagaggtcagcaggggacagaaaaagcctcaaatcctgggccgaggagttcgggcttcccccacagagtgggaagctttggagcagacggagctgagtgtgtcctggcagctgggccagctcaaccgcacggtcgtcttgtgcaaatgagaaaaatacacccttggccgggcgcggtggcctacgcctgtaatcccagcactttgagagggcgaggcgggtggatcacctgaggtcacgagttggagaccagcctggcaacatggtgaaaccccatctctactaaaaatacaaaattggccgggcgtggtggcgggcgcctgtagtctcagctactcaggaggctgaggcaggaggatagcttaagcctgggaggcagaggttgcagtgactcaagattgcaccattgcactccagcctgggcaacagtgcaagactccctctcaaaaaagaaaaggcaggctgggcgcgatggctcatgtctgtaatcccagcactttgggaggccaagggggcagatcacctgaggtcaggagttcaagaccagcctggcccacatggcgaaaacccatctctactaaaaatattaaaattagctgggtgcactggcgtgtgcctgtaattccagctcctcgggaggctgaggcaggagaatcacttgaacccgggaggcggaggttgcagcgagccaagactgtgccactgcactccagcctgggcgacagagcaagactctgtctcaaagaaaagaaaagaaagacaagacaagaaaaagaaaaagacgctctctctctgggggctacacttgggagttcagctgcctcccagccggtgtgtgtgtgttttgtgtgttgccgggggagggtgttttgtacagtgcacaacatacctcactgtacatagccatcccaggtacctgcagccttccatttctccgtacagtctcctcccctgcctcctcctcctcctgtccctacacacacacacacacacacacacacacacacacacacacacacacacacacacacacacacataagccagccttcctgaagggactcacagccaaggcctcctctgtggcaaattccattgcccccctcctgtgcaagcgttcgaagatgaccgtgtcggcgcccttggtgtacaggcagatggcgccctctggctttcgaactgtgggggaacaggccctgctgcccacagaggctccccgtctgcccgccccaccttggggggcccagggcttgggtggcggggctcacccagcaccgacatccgtttgcgcgtgctgttgaagtccattatggccaggacctggtagacccgttcctcccccagctccatgatcgtgacggtgtcctgggtgcgggacaggaacacgtagccgaagttccgggctgcggtgaccagcgccccctcgtcgggggaggccgcctggtacaacagctggtctggtagggaggggggccattttggggtcacgtggtggagcccgtctccatctccacagtgcagggaggagatgggtatcgcctgggctacacctttattgatggtggccggggacccccgcctgtacaacccaatgcatggaggtgagcacttgagactagacgaccttcccgctcaacaacagatcctcgggctccgaccgcaggcctggacatcctttagccctgacgatgacacgtccgccctcccgccacgatgcttgtcagcactgtctgggctccaggcccggacgccctcgaggtgcggctggtgtcacaccggcctcagcgccccccaagccagctgaaagccctggaagatgggccgggtgagctgcggggctggggacactgccgtgccccgggggctgagcggcctcagagatggggaggtgggtgggcgcacctgggcgctcacgggggctctcccgcaccatcaccgtgtggcagatggccagcaggcgccagaactcccgcacggcctcgtccccgttggtccgcacgaggtgcagcagggccgcattgtggaagagcagcttcccgtcggcgaacttgttccagaggtaggggttctcctgggggtggcgggggcacgggccggctgtgggtgggccgctccccgtgccccgtccccctcaccgtcccgcgctgcaagccaggcaggctcaccttaggtcgggtcgtggcctctgaatccggccctggggaaagacacagcttcctgcttcagctcccacaggccccccattcgggatcccatagcccctgacccctagtttcaggcttccgggggccactggtgcagccacacaagccaggcctgtggccctggaaccgacaccccgagcaatcttggggcgaaagctgacctcagtttccaccacctgcagaaagcggggaagaggggagcacacccatcctgtctcccagggaccccaaaaggacagcctggagccggatgcggccccgtcccgtctcccagggaccccaaaaggacagcctggagcgggatgcgggctagggaccccaaaaggacagcctggagcgggatgtggccccttcctgtctcccagggaccccaaaaggacagcctggagcgggatgcagccccatccgtgggacacactttgtttcctcctcctggggtttttgttcttttttatttttatttatttatttatttatttatttatttatttatttatttatttttgagacagagtcctgctctgtcgcccagactggagtgcagtggcacaagctcagctcactgcaacctcagcctcctgggttcaagtgactctcctgtctcagcctcccgagtagctgggattacaagctcatgtcaccacgcctggctcatttttgtatttttagtagagatggggtttcaccatgttggccaggctggtctcaaactcctgacctccagtgatccgcccgcctcagcctcccaaagtgctgggattacaggcgtagccaccgcacccagccactttttatgctttattgttcttagaaatggggtcctactctgtggcccaggctgcagtgcagtggtgcgatcatagctcactgcagcctcaacctcccgggctcaagacatcttccctcttcagccttccaagttgctggggcaacaggtgcatgccacccctttgtggtgtcttttgtgtgtgtgtgtgatggagtctctctctatcacccaggctgctggagtgcagtggcgtgaccttggctcactgcaacctccacctccgggttcaagcagttctcctgcctcagcctcctgagtagctgggactacaggtgcctgccaccatgcctggctaatttttgtatttttagtagagacggggttttgtcatgttggccaggctgctctcgaactcctgacctcaggtgatccacccgcctcaacctcgggcccatttttctatagctgaacttgaaccatttcttggggacttctcactacactaaattatgacccagtccaaaccacgtgccctggttataaattagacccggggctgtcaaactacaccccaccacatcatcaatttttgtacggcctgcgagctaagaattgtttttggatttttaatggtcaggaaaaaaaatgactagaataatactaatactgttttgtggccgggcgcggtggctcacgcctgtaatcccagcactttgggaggctgaggcaggcagatcacgaggtcaggagatcgagaccatcctggctaacacggtgaaaccctgtctctattaaaaatacaaaaaattagccgggcgtggtggcgggcgcctgtagtcccagctacttgggaggctgaggcaggagaatggcgtgaacccgggaagtggagcttgcagtgagccgagatcgcgccactgcactccagcctgggcgacagagcgagactctgtctcaaaaaaaaaacaaaaaacaaacaaacaaacaaaactattttattttgtgatctgagaaatactcagcaattcgaatttcagcatccacaaataaaggcttgtgaaagtcaaaagaagagcagtggccgggtgtggtggctcacatctgtaattccagtgctttgaaaagcggaggcaggcggatcgcttaagcccaggagttcaagaccagcctgggcaacatagggattccctgtcttgacaaaaaatacaaaaataagctgggtaaggtggcactctcctgtagtcccggctacttgggaagctgaagtgggaggattgcttgagcccaggaattcgaggctgcaataagctatgattgcaccactgcattccagcctgggcggcagagcaagaccccatctcaaaaaataaataaatacacactgtttaaaagtttggctaggtgtggtggctcatgcctgcaatgccaatattttggaggctgaggcaggcagatcacctgaagtcaggagttcgagaccagcctgggaaacagggtgaaaccccatctctactgaaaaaaaaaatacaaaaattagccaggcggggtggcacgcaactgtaatcccagctacttgggaggctgaggcgggagaatcaacccaggaggcggaggtttcagtgagcagagatcgcaccactgcactccagcctgggcaacgagagcaaaactccgtctcagagagaaaaaaaaaaaaaaagtcggccgggcgtggtggctcacgcctgtaatcccagcactttgggaggccgaggcaggtggatcgccggaggccaggagttcgagaccagcatggccaacatggtgaaaccccatctctgctaaaaatacaaaaaaattaggtgtggtggcaggtgcctgtaatcccagctactcgggaggctgagccaggagaatcgcttgaacctgggaggtggagattgcagtgagccaagattgcaccactgcattcctgcctgggtagacagagtgagactctgcctcaaaaaaaaaaaaaaattttcctggccccctccaaaggaaaccaggccatctggctacggttccctggttcagattcgggcggaggtgctgggcatggggccagacgtggctctggttctcaggcaccctgagccccttgaagatcgaggacccagctgggagctcaggtgtcggggccgcaccatagacgcggccgctgatgcagcacttgttgaaggtcaagatgttctgcgtgagcgtgcccgtcttgtccgagaagatgtattccacctggcccaggtggtcgttgaggctggtgctgcgggccttggcaggcacgtcctgcggcttgtagtacatctgcacgtcccagtcgatgaagacgctgttccccaggtagatgaactcggacctgcagaggcactcagggtcacggtcagccccgcctgctgtgtgccatccccatgcctccccgttccgcgtttgcaccggggacgcagccggcggagactcacaggatgaacatggacatcgggatggtgacgctgagcaggatgaggaagctccagaagacgaagaaggactctgcggccacgctgctcccatgcacccccgagaggtagtagtggtggtctttgaattctttgactgagaaaccgaagccgaaggccaacaccaggcagacaagcaccacggagatgaagatctggaaggcagacgcgacagggtgggtgaggggggcgggggtcccccactctgccatcaggatggggtaaacacaaagataaggctggggctgggcacagtggctcatgcctgtaatctcagcacttcaggaggctaaggcaggcggatggcttgacgtcaggagttcaagaccagcctgggcgacaaagtgagacctcatctcgacgaaaaacttaaaaaataaattagtcaggcatggtggcgcacacctgtagtctcagctgctcagaaggctgaggccgaggatcgcttgagcccaggaggctgcagtgagatatcatggcgccactgcactccatcctgggcaatagagtgagatagaaaaacttttttttttttaatttttttttttttttgagacagagtctcgctctctctcccaggctggagtgcagtggcgcgatcttggctcacagcaagctccgcctcccgggttcacaccattctcctgcctcagcctcccgagtagctgggactacaggcgcccgccaccacgcccggctaattttttgtatttttagtagagacggggtttcactgtgttagccaggatggtcttgatctcctgacctcgtgatccacctgcctcagcctcccaaggtgctgggattacaggtgtgagccactgcacccagccgaaaaacatttatttatttttatttttatttatttatttattgagacagagtcttgctcagttgtccaggctggagtgcagtggtgcaatctcagctcactgcaacctccacctctggggttcaagcgattctcctgcctcagcctcccaagtagctgggattacaggtgtgagccaccacgcccagctaattttcgattttctgtagagacggggtttcaccatgttgttcaggctggtctcaaactcccaacctcaggtgattcacccacctcggccccagaacgtgctgggattacaggcatgagccatctcacccagcctaaaaatatatttattctggccaggcacggtggctcatgcctgtaatcctagcactttgggaggctgaggagggcggattgcttgagctcaggagttcgagaccagcctgggcaacatggtaaaactccgtctctactaaaatacaaaaaaattagccaggcgtggcggcgtgcacctatagtcccagctactcgaggggctgaggcaggagacttgcttgaacccgggaggcagaggttgcagtgagccaagatcacgccactgcactccggcctggtgacagagtgagactccatctctaaaaaataaataaatacataattattattattttataaaactttttaaaaaattactttaatgaaaaattttctggcccaaagacctgcccacaggatcaggccgcacattttgcagaagaaggaaactgaggcctggaagatgacatccctgaccctgcactcctctgtgttcctggggcaggggcacttgttggcagctcaccacaaccaccagcttgttcatcaggaggtccagcttggttctcttcaaatggatcttgccacagttcttcataatttttgtgtcaaaacctacaaacatgtatccatctatccacccacccacccacccatccacccctcacccacccatcactcacccatccacccactcccccactcatccacccacctacccatccacccctcacccacccatcactcacccatccacccctcacccacccatcactcacccacccacccttccacccctacccacccatcactcacccatccacccaccccccactcatccacccacccacccacccatccccacatccaggcacccacccacccacccatccccacatccatccacccacccatctgcccatctatttgtctatccatccatgcactcatcctctcacacatccatccacccacctacccacccacccatccccacatccatctaccacgctcccatcagtacagctcccactccaggaccctggagcagccgtaccagcataaatgaccagtccatagcaggtgtctgtgttgcgaatcctgcagcctcggaggaggaggttgccaatgtccagggagtatttcttgtcattccattccaggcaccccacgaagtggtgcatccgactgttaggcgcctcacacgtcactgtgcctgtgggtggccaggtggtcagtgggtcagtgggctcaggccctcctccccaggttccctgcaccgggtgcaggtgagaacattccggccaccctcacgagcccctctgtgccccaaacttgccctatggtgccccagcactgggctgcctccaaagccttcctgtccccacctggcctcagggactttgggcaggctgttccttccacggggactcacacttccctgatcctccagccagatcagcccctcctagctcctagctccctccctcgtggttctgatcccagcatgtgacgagacatttatctgtgcaaagctattgttaatgtctgtgaactccatgagaactggtgccagcctcatctcggccacactctgaccccagggcacggaccagcacctgcatgcagtaggtgctcaataaatgtgtcaagagggaagaggagaagggacgcctgatcgatgagcctccttttgggtgccggagcctgtctaccaccaccaccagccccccattcaccaacaccctgcaatggcctcacttcattggagaactgcacagactggcccggggcagcattcagtgagggttaaaatgacaatggggcatgggttgggaccccagaagagagaggggccacagggttcctgaagggtcctcacctgcctccccatcgcgtcttagggatggggaccctgactccatcctggatgcaggaattggagacgctcatggtgggacggccagagggcagagaaccacagggcaagcccacacctcaggccacctctctgaacctcagtgtcttcctctgaaaaatgggtctatgcccagtgagaatgctggggcagatggacgaggccagggcccacaaaagcctccttgctcagcccgggaggaaatgctagaggaagagccgctgcctgtctatgagtctgtgtcccagtggtgttaaagaaggaagccggccgggtgcggtggctatgcctgccatcccagcaatttcagaggccgaggcgggtggatcacctgaggtcaggagttcgagaccagcctcaccaacatggtgaaaccccgtctctactgaaaatacaaaattagctgggcgtggtggcgggcgcctgggatcccagctgctcgggaggctgaggcaggagaatcgcttgaacccgggaggcggaggttgccgtgaaccaagatcgcgccactgcactccagcctgggcaacaagagcgagactctgtctcaaaaaaaaaaaaaaaaaaaaaaaggaacctttagccaagttctgggactgtcagggaaattagagaggatgggtgtggccccctccaccagggctaagcctttccccagatatcacagacagatggggaaaacctctttgggtgtcaggagcaaggaaaagattctgtcctcaaaccaattagagtgactctccttcacaataagataagaaaaccaaacaaaactgtacccccagactgggctgcagcaaagagtaactgtttccacatcacgtgtgaaacatctccaggtggaaaataagaaaccgtcaagcaggccgggtgtggtggctcacacctgtcaccccagaactttgtgaggccaaggtgggtggatcacctgaggtgaggagttcgagaccagcctgaccaatatgatgaaaccccgtctcggccgggtgcggtggctcatgcctgtaatcccaacactttgggaagccgaggcaggtggatcacaaggtcaggagatcgagaccatcctggctaacacggtgaaaccctgtatctactaaaaatacaaaaaattagccagcctggtggcgggcgcctgtagtcccagctactcggaaggctgaggcaggagaatggcgtgaacccaggaggcggagcttgcagtgagccgagattgcgccactgcactccagcctgggcaacagagcgagactccgtctcaaaaaaaaaaaagaaaaaagaaaccccgtctctattaaaaatacaaaaattagctgggagtggtggcacgcacctgtaatcccagctactcaggaggctgaggcaggagaaacgcttgaacctgggaggcagaggttgcagtgagccaagatcgcaccactgcactccagcctgggagacaagagcgaaactccgtctcaaaaaaagaaaaagaaaaagaaacagccaagcattggaggtgtcagcactctgttctcagaggccttcccaccacaggaattgccagcccatgcacgcaggtgccttttcaatgaaacaaccaaacgtgactgtgttatggttaaattttacacttaatagaatgtagcactttatttttggttttgacacaggggtctcactctgttgcccaggctgagtgcagtgatgtgatcacagctcactgcagcctcagcctccctgagctcaagcgagcctcccacctcagcctcccaagtagctgggaccaccggcatgtgccaccacgcccagctacttgttttatttttgtagagatggggtctcgttatgttgtccaggctggtcttgaattcctgggctgaagtgattctcctgcctcagcctcccaaagtgctgggattccaggtgtgagccactgggcctggccagcaccttgttttaaaaacagtaataacaacaacaaaataccctaacttttaacttttacagattcgagggacgtgactccctgctcaacgcctctcaccttgaaaggacgccatcttctttatagtggccagttctttgtgggtgaccatcagggcctgtctgaacttcaagttggtctccctggtgacgaggagaggagggaggtgaaagtggagttgatggatgcttcgaggagcccccagaccccttctggagtcactcaaacattttcactgagcacctactagttcgccagctgccagtcagatggctgaggcccagagagggagaaggccttgcccaaggccacacagcacatttgcaaagtgctgaggccagggcctagggcctagggcctcctgcccgtatgcacacaatggaaacaatggggagggtgggcgtcttcctcccctcagtgcctggcagcacccacgccccagacactcatggggtgagtgaccaaagtctctgagcgaccttggctggccgcctccttggtgactggggaagggggctcctccgggccatgctccccaccccccagggtccccagcgatgccacagctcctcacccgtcaatgtccaccgtctccacatagcacaggctgctgggctccgtgctggccagcaagagcatgtcggcctggtgtggagtggggggcagcgttgcaagaggggatgcaagacaaattgggggtgcggcagccctccccaccctgggaggggtgctctcggtgagggggcgcgtggttctgggacctcggggtcaaccccagctcactgggacgatgttgtccttgcggagacagaccacatcccccacgcacagatcctgccatttcttctgcttgaagctgcggggagagggggttgtgaaggaggcccctccctctgcaaaccctccccacaccgggagaccagaggcacgggatgacggggggcccgcagctgcagtccccacctccgggcctttgccccctcaggaagccttccccgggctcccaccccactccccgcgggtccacgctcccacccagtgacctccagggtcctgcacccacgtcctcttcagactttccttgtcctccccatcgcccgagccctaagctctgcaagggttcgccatcagggcctcggcctctgtcctcgtcccggccaaacgcctaatgaatgcaggcccggttcctgtcggactcaaccagccgggagatcagggagcacggaaggtgatggacacttgccgaggccgatgaccctgctgggctggagcccccgtgtccccgcggatccccagctgcagccccagcctcacctcttccccatcagaatctggcagggtctgttgttgatggctctgtcactcttgtgtctcccctgggccaggagggaaaggatcagagagaccgtccagcctctcctgcccccgcccaggccgctgccgcactgcagcccagcagtgcccgcccgcaacacggggtccctgtccgctggccccacgccacgttgcgtctgctcagggatcccggacgtgggggccactggacccactgctattggcggggagaagacaggcgtgctgcccaccacctagagtgcctgccagaccaccccccaccaaagctcaatggccccaaaaccacgcaccgacagagccaacgccacctgcggcacctgcccaatgtgggtgctagcagataaggacaatgtagccccagcagctgaggctcccaggcccacgttcccctaatgctccaggaagcccagccctcctcccactctcgcccagggatcaagagacccccccgaccggccccgctccctcccccaggcagctgcatccaacagcactcaccatgtcgtccaccaggtcccgggtggcacggatgaagaggaggcagaccataggggtactgagcgagaaccagggcagcgtggagatgtcgggaatgctctgacgtgagggggccacaggaagggtcacaccagcccactcccccgtcccctgcccttccaccaagccgacctagccccgcactcgacaccacgtgacacatctgctggccaccttgaccggggtccagccatctcctgcaacccccagccctcgggacaaacgccccggcatccctccacctgcctggaacttctcccacacgcctcgtctccccagcaaactccccttctcccgtccaagcccagctcccacggtgccttctccagggagcctcccccagccccaagcttggccgccactgctccccctccctcccatgtccctgcttccccaggtcaccctgcaggtgtgagctccaccatcccctaccctggcacccggccagcggcctgcacacagtaggtactccattaatgctgaatgactcgatggatgaaaggagaacctctccatccagaacagaaatgagatgttgggtgagagtgtttgctctgaaaacagcgcccctggccggatgccggccccacgctggcctggaccacccaggtaccgggaagtggctccacaggtcctgagaacatgctctgggctcctccttccccctcgcctctgaggtcagctgggagggcgggggccaggggagctgcgtggccgaggccgtttaggctggggaacagctatgcctcccgatgcccagccctgcccagcaggaaccagcggggcgtggagagggtgccgtcatcagacctggagggtgcatccatccacctttgtcattcaacatgtactgagcgcctcttgtgtgccaggccctgggcagggtagtagggactcagcgctgagggtcccagtctgtggggagtgggacgtgaacccacccatcacacagacaaacacatcgatgctgccaggtggctaggggggacttcctggaggaggcaacacgcctcacctgcaggatgatgatgatgaggaagaacaggttggacacgcggtggaactgctcgtacaggttcagcggcaggaacgagtagaagttgtacttggccgtgcggatgacattggtctggaacgagagccgcgggctgcctggcagaggggtgccatccaggccaggggatgggggtgcccgaggccagacctgcctcacttggcctcgcccagcatcctctgggctatgggacacacaccattcattaagcatctactgagccagcagttactgagcacctgctgaatgcaaggcctcagaccagcatttactgagcacctgctgaatgcaaggcctcaggccagcatttactgagcacctgctgaatgcaaggcctcagaccagcatttactgagcacctgctcagtaatgtaaaagcctggagccagcattaatcaagcttctactgagtgcaaagactcatggagctgtgaccagcatttcccaaagcaagacacccaagaggatttcaggtagggccgcgatggacacattgtactttcaggttgggtattaactgaccctcacgtgcactgggacagggcaaatgagacacacagaactcttgtgccaaaccagtgatttggttaggacgggcggttcggtcctcgagatgaaaataaaaatatcggccagacatggtggctcacccctgtaatcccagcatttcgggaggtcaaggtgggtggatcacttgaggtcaggagttccagaccagcctggccaacatgacaaaaccccatctctactaaagatgcaaaaaattagccgggcgtggttgtgggtgcctgtaatcccagctacttgggagtctcaggcaggagaatcactagaacccgggaggcagaggttgcagtgagccgagatctcgccactgcattccagcctgggcgacagagcgagactccatcttaaaacaaaacagaaaaaagaaaaaagaggctgggcgcagtggcttacgcctgtaatcccagcactttgggaggccgaggtgggtggatcacctgagatcaggagttcgagaccagcctggccaacatggtgaaactgtctctactaaaaatacaaaaattagtcaggcgtggtggtgcatgcctgtaatcccagctacttgggaggctgaggcaggagaattgcttgaaccccggaggtggaggttgcagtgagccgagatgtcgccactgcactccagcctgggcaacagagggagactctgtctcaaaaaaaaaaaagaaagaaagaaaaagaaaacgaaaaccaaaaaaagaaaactatcgagcaaatacaagcagaggcaggactcaggaggagcaaaaaatagattccccgagggtaccacggcagctcctctggagcagggaggcgcgggaggggccgcccaccttgtatttcttcctttgccagcacaggatcaccttctccttgaactgcccgttgtaggcacggttgttggcctggaccttccaggtgaatgctgcagcgagagagccgggcgtcgctggagctcgaggcccaggacaaacacccctaatgaccgcccggaggagggctcatggggcccgtgggacccaggcactggggaggcccgagatgtcagagcccgtaaacagacagtcgggcagcaggcaccacctggggacctaccagaccctgcccatagttggcgccggcacaagtggattccgagagtggccacccacacccccagccaggggcctgtcctgagacgcagagaacaggccctgggagaccgttcaggcctgtacattttacagaggggggtaaactgaggcttggtgatgggctcttgggtgtccaaggccatacatccagctggcggcccagatctttctgggcatgcagcccccaaatcctgagccaaatcccccaaacccagtcagtactagggttggagactactagaaaccaaatgagaatcctaggcaaggcctgacgtgcaggtctgggggccccagcccgtctcagcctcagccctgcacttttttcttttttttgagatggagtctcgctctgtcacccaggctggagtgcagtagcacaatcgcagctcactgcaacctccacctcctgggtctcctgggttcaagtgattctcctgtctcagcctcccaagtagctagaattacaggcatacgccaccacgcccagctaatcttcgtacttttagtagaaacggggtttctccatgttgcccaggctctcgaacccctgacctcaagtgatccacccgcctcagcctcccaaagtgccgggattacaggggagagccaccacgcctggccagccctgaacttcataatccctcccacctgcaccgccccctctgcccaggatcagcacctgagttcctgtcctcatcttggagatcttctctctggccgaggctgcccatgctggtggggctgtgggagagaagggccccgggtcacagcagtgaccccagcccttgctgggcaccactcggtcttcaaggagctcacagcctaggggccgaccctctcaaatgctacctcccacactcatctgcagcctccccgccaggctctgaatgtccagccataggctgtgtgtcttgccttggacatcctgagacctaggggaccccaagatgatcctcaaacctgcaacagcccatctgccagtgtcccccgccagccaccctggtcgcctcccgccagtacagcctagaaggactctaccgccagccatgccagcctctggccatgccagcctccggccactgctccccacacctcgcttttcctgaaaggaccactctcacctcctcctggtttcactgacggcctcctgcccctctccccatgtggcaccagcttaggggctcagtcatctgttcactgactgaatgggacccccgggctatatgttatatctcaaaacacagcatgagggtcaggcatggccactcccctcctcacccccccaggctgggcagcaaactctgatgggggcgatggaggcagacggacatcgtcagaagatcctggaatcttctccactagcaggttcaggaatgtgggtctggctctagccctgcaccgggggccctggtttggccccctatgaggatgggcaaaccacccctagacgccagcaactggccccccacctgccagctctctagcagtgccctccccgccaagcccctgcccctgtgttccggccacccgatgcacccgtcctcacccttctggtctccattcatacttcctagcccggccaggctgggccttgtgcctcctctcaggtgcccctctgcctggggagtctcccatcccagctctgatcaccgtctcacctccgcggatgccagcaggacctgagccttcctgagtcacgtctgagtcacccgtgtccccaggtcctggtggggcagggcttggctcagggccagctctggtgctcctgggagtctgagcggggccagtgcccattcaccgcatgaggaaaagggaggttcagggcgaagaggggtttaggctgtgggacgggggagaggtgggggagacccccgtgggggcagactggggattggagagttggagagaatgctcaaatggccagaatccactcgaagtgtatctgggggcagaaagagacacggacacagcgctggcttcctgccccctcactaactgggatgccccattactcggaagccccccaccccgtcttcccgcagccgcaggggcacaggaccgccctggacagggctccagagtccagggctgtctgcacccgccccggggccccgaccgcgcgaacctctaggggcgcgctctccacccccgccgccacgaccccagctctcagcctgggtggagcccagagagggtgcgcgggctcccggggacgcacagcagtgggagcacccgccgctcaccggcgcaggagaggcaggggggggcaggccgcgggcgtccagggcggcggacgtggtggaaccgttagcccggtgccaacggtcctgaaacggggggcgggatctcggggcggggcctcggggcccggccaaggcgaaggtggagccagttcggaccccggaagggggccgggggcggggcctggagggggtgggtggggccaaggcgaagaaggggcggggcctcgagggtggggccgagcggagcacggccgagcaggatgggggccaggcctcagggacgcggtcacggccgaagggcggggcctcgcagagcctcgcagaacaggccgggatagaagacgctcgggagcagtgcctgggtctggggaggggccgggactttggggaagggactagaaggaaggcgaggacgagcggggtctcgctgagcaaagtcagagtaggggcggggccaggactcaggggcttggccagagcgggaagcggggttgagcatggccttgcggagcagtgttatggtaggggcggggctgggatccggagccgttacaaaggaggaaggcggggccgcgcagagcagggtcagggtaggagggcgctcagggtgggtccaggacagaaggcagggccttgggagggccttagggagcagtgccagtgcaggggcggagcctgaaagggaagagggtgtcagggcagggccgggccgggcttggtcagggagcagaaagaacctgcaccgcagggcggggttggaagggttcttggaaaggtgggcctgggtcaggtcggaatgggccttgcagacctgacggggctgaggctggtgcggccagcgtggcagagtgcaggaggaaggaccacaggtaacggcggttatgtaagtcatgtctgatccgtgtcctgggttcgttcattcatcccatacacgttcaacgagcgcctcctaggcgcagatgcagggctgagcaccaggctggggagaggcggttatagccattgagaccaccctaaggccaagaggaagcccgcagggttctttccagcaggtggcaggggctcagggatccttactgaagaagtggcaggggtgagttcagcgacgaggctagggcgggtccaggccagcgatagggcctggagccagggtcagaaagtgtgtgcggaggggctgctgaagatgaaatgcccccaagagtgaggctacctggggtgagggcccaaagggagaggcaaacatgggtggagggggatagggaagccacctcccccatcaaagcggcaaccacctgagggctctcggtgatcacaaaccctctttctttggaagcccaaattggaagcctgcttggccctggaggctgccagggaacctctctttttttggagacagagtctcactgtgtcacccgggctggagtgcagtggtgcgatcagagctcactgcagcctccacctcctgggctcaagcgatcctcctgcctcagcctccagagtagctgggaccacaagcaggcaggcaggccactgtgtttgacttctctcctttcattccttcaacacttcccctgtgcttgcttgcttgctcagtggttacgaaaaaaagccggggctgggagtttgaacacactgttctaataaactttagaagagacctggttgggtgcagctgtgaggaccagattcccccaccccagccttcgcagggggcactatctgggggcaggagcttgcccagggcacttgtgcaaaggccctgaagcctccagtggcaacaggtggcttcacaagctgaagggagtccctgggggctgaagccagggctggccagccttgggaccccccgtgggctatgtcctgaggcaccaggtgcgttctgggaagggggaggcagacatcacatgggaatgcacagaaacagagcgcatacacgcctgcgccatttatttagaacacagagccgggcacagtggctcatgcctgtaatcccaacgctttgggaggccgaggcaggtggatcacttgaggtcaggagttcgagaccagcttggccaacgtggtgaaaccccatctctactaaaaatacgaaattagccaggtgtgatggcacagccataatcccagctactcggcagacagaggttgcagccagctgagactgggtgacaaagcgagactgtgtctcaaaaataaagaagaaaaagaaaacaactcctttacagaagaggtgggagagtcactagtcacaagaacagccctcgagggtggaagggcctggcctaaccacggtcccccaggagggccctggagagatgcagagcccagaaccgggaagggagccttgggatggagtcctctggggagggcccccacgtcctcatcccgggacctgtgcccttggccttgcccttcagcagaagcccaagaccagggtggcaggaaacccactccaggcaacctgcccccagctgctgggtcctgtcccgcaaggctcatcactttttctacttgaggtcaataaaaagtggggcctaaacacccctgggcctcccatttccaaatggggtcccgatgcaaccacagttgcccgagacgtgcgtgcactacacaatgtgtggcgtttcctggcaagggccggagcagctttccgtgtctgcactccatcctttgacgggcaacacacagcagctcccagtctctttaaccccctctcaccatctgtgtgcagtccctatctctgggcagggcagagagggaagccagctctgtgcacagggcccagctccacacagggctggggacaccacccactgtccgagaggcactagaagctgcaggatggtggcccatgatctggggctggaactgggaccccacagcaggtgtggcccagccctgggggagccagccctgggccagcttttgtgagggaaagtttcactgctctgttttctctgcgttgatgggaagagaatcagtcccggctgcagggacagtggcctccccggggcacatgcagaggcctcaccaggcaccaagaccaagaccaccacaaaatctaaaatccatacaaacatttattctgtccctgcctggaggtgagggggaagggggtccggagagccccgcagaggaggacggggctctagcgggaagacagtgtccggaggccggtgggctccctctagacggcagaccctggggctaacgaggggccagctgggttctcagaggtcacggagtgcaggggtggggcggcgagtggtggaagccggcgcccccgaagaccggccagcccctggagcacagaggcgggtccagcccacactgcgctgagtgtggccctggcccccactggggtctgtcccacccccaccccgcaggagggaaggcagcaggcccgctcttcccggtgggaaagatgctgtgcaagtcatcaggtttaaattaaaaataataaaaataacaatacaaaataaaaaaagactgtctcaaacaaacctgggacaagcccgccccgcgacccacgtgaggagcagaggtgccggccaccacccgggagggagggcctggcaggaggggcaggaggggctgcgggccgggtgggggcgggctctgtcctggtctccatcagcagcagtttctagagacgccagagggctggggggcagagggtggggaccggcggaggggtgcggcaggacgtgagcgggggtgggctgggctgggcgttctctggccgccagctcatcccgctgctctgggctgcctcggccaggtggacgggttaccggagatttattgcactgttttggaagaggcatggggctaaggaccagcgggacggcaggagaggcgggtgggaggcgggcaggcgtcatcgcttggtcttggcgtcttctcgaaccttccagatcaccaggtgcatgcaggcgccggcgtcctcgctggagctgtgcccatccactgcggggcagatgcggtgagcacccggcccctgcgcagggacggccccagggcaggcaccggcactcaccattgtcctggatgatctgtctgaggtagtcggccatgaggttccgcagggaccgcttgtaggggaggcccaggcggtgggggaagagcacagacgtgtccaccacggtgctgtggatgacctgtgggcagcggcagagatcagcgcacgtggggcctgcgcaggtcctgctggagaaccgcgcgggacccgggccggcagggcaccttcagggccaggaggtcgctctccaggctgtgtccgatgaggatggtgtcagcgctgaacatgctcagcagaacggcctggacgtcacgcagcgtgacacttgtgtcggcaaggtcagcctccgtcacccccgaaaacctgggggaacgggcaggaggggcaccagggctcagcctggaagcactggctggtggggcgggggagggtgggtccctggggagaggcggctgggagggctcccagctcgtggagggcactggccacacctggtgttgtagtccacgatctcgttgtcaggcttcacgaaggtgtcataaaccacgtgcacgtccgtgtcgaccaccgtgacgcgcgtcagctccaggccatatgtggtgtaggactgcgggcaagggatgcacctcagatgtgtcccaggcaccggcctccctccctccccttccctgcccctttgagtctccagagcccctccaggcagaggcagtgaccagagactctgtgggacttctaggagaggccgagtggggtgtgacctcagtaaccccctttcgcaaagccctcctgcctcccattcagaggcagagccggggcccagtgcccggtgtgcttggctctgctgggaagtatggggtgttggtccagggcaggagccacaggcaccggtgctgcgagagaaaccctgagcgctggccggtgagccaggcccagatggggccagatggggcggccgcaccaggccaggtcctccccaatcctgaacccgacgctgggcagagaacagcctcaccatctcgcagtccagggcgtagatccccgggtgggtgtctcctgagagctctttctcaaaggtcttcacgaagccctcaaggcgctccttccggccatcctgcacgtgttgctgggggtggagaaggcaggtgagggcagcttcggggtgcagtgggggcgggggtggcagcagcagcacatctctgagcccttcgggaccatcctatccatccatcacgcccattcactggttgggaccctggtgagcaggtggggaagggggcttgccaagaagacacagggaggacggcttcccaggatgggaagtggccagggacagggcctggggcctacgggtgctacgttctctgggtaacacaagaaaggctgcccgggggcccagaccctgagcccaggactgtgctgtgtcccgagaccccacaccaacgatggggaggcagaagtctgttgagaacaggcagaggggactgggacgccagggctcacctttgcgacttggcagccgacagagccggcggcagccgagcagcacatgtactgggtctcccagcctccggccactgcaggggacacagacacacagtcagggcccggccaggcccactccacagcccccggggcactgaccacctgcatctaccgagccctactagggagtgaggactgaggacaggaggcctcagcctcttggtggagctggaagcagaccaggccccggcagtcgtgtggcagccaggacgcccaggcctggatccagggagaccagtgccctctgcagaggcctcttggcagcgctgccccgggcagcaccctccaggtatccctgaggcgatggctttaggggccgccacagggctgtgcaaggctggccatgtgccctgagcgtggctgcgtggttgcctgggggattgaatagaaccaccaggccaagggtgggacaagcccctccgctcctggggccagcaacctccacatttccatggaccaagggcacaggaaggcagggacacagggcctttcaggtggtggcatttgaaccttgtcatgggaaagctcttgtcttacttttgcataaagaacaggtggagagaaaatgaggccaagggctagccccggctctgccaaagacggtgcagcccagggaccctgagtgggatggagggcctgggtaaagccttaccccagttctgggggcctcaagggagggcccaggttccgggggccatgggtgggaaggggaaggacccgggtaaggccttaccccggttccggcgcagccgtccccagtggtaataacactcctcgtcccggatgcagcggcctgaagaggacacgaggtactcggtgccacagcggcagcaggtcctgcaggaagctgtgggtggggacccaggtggaagctgaggctcacgctggggcccgcatgcccggccttgcccacatcccgcacctgcccacctaggccgtcgcaggccagcgactcacagtccttgggcctcttctcctcagctgtgaagatgattgcgcccccgggccgctctgggtgcgggaaggggtagccgttctccttgagctggtcctgggtgagcaggtactccctgaggcggctgtacagggcagcccctgtggacaggcacagtggtcagcccctgcctgggatggcccacggggcggtagacaccaccgggaaaggcggctgggccggcaggggcccacgaagcaccgtgtggcacagcaggggctgggccggcagaggcccacgaagcaccgtgtggcagagcaggggcagggccttacctttcaggtcctccacccgggggctgcttggacggctgagcgagaagctggtcttggcggccaacctgccccccaacaccacctcgtgggacacaaccctgcggccactggtttctggaaggaagggagggaggggaggagggtgtgaagtagctggctcagacccctgccccgcctgctctcccacccaccctgccctcctcagacctctgcctcaactccccctttctgggacagcaccccactgaccccgggttccagcctgacccgaacaggagaggcagacatgcggtgagccagggacgcagggcagccgccagctctgcaggccccagagctgcacggaggccccacacccaaagtcttcgtcccctcccctcaagcgaagggggaagggcggggagaacagcacgggggatctaatggctttcgagggctttgagccttcatgggccacccagcctgcgacgccaacccagggcccctccgagtgctaatgcaggcggggacgggggcaggggccggtgatagcttaatgcagcctggagaggctgcaatgaaacgcccaggtctccgctttcttcctccccagagcttaatgcatggagctcgcccagccctgggcctcctgctttgaagaagctgccgcagctccattagcaggcggcccctcggctcggcttggagaccccactcagcggaggaaggcggctgacagcgaggacaccagggccaggtccgtcctacacagaagcctgggaaccaggcagcaggcagcccccccacagcaccgcgctttccttttgtctgagactgtggctgagctcagggctgtgaaggtcccagcgagggtcccagcccagctgccaccccaagagcaaccctgagcctcccccgcccacccgccaggactcactgctgaggccgggcacagcgctgggggccaggcccctgagcttcttgagggtgttcacggccacattcaggtagatgttcttgctggggctgcggtcataggccaccttctcctcgttcagtgcctgggggacaggcggtgcccagctgaggccatgcctgcctggtgccggggagccccagcggtggggtcgccatggggtcggggacttgcatctctcccaggcagctccgggtcacagctgcggctgagaggccgggggatgtctggggaccaccctggacccctagtccccacccgaccggccagataggaactccaggacctcaccttctctatggcctcctggttggaggtacagaacttgagacactcctcgatgaacaggttgagatagcgctggcggatgacggtggggactttgcccccaaactctttggggataatgggtttctttaaactctagagggaaggcaaaagctgccatgggtgagggcctccacaaggcctccagcggggaacgcagacgcgatgaggccgtgcccatggctggaggcaagagtgaggtgcgctgggacagatcagcctggctgcagtagggacagacacgccaaggcaagacaggagcagcaggggaaactgagggcagcggaactaaggtcatgggaaactgaggccatgggggcacaagggaacttgctgtactttctgctcaattttcctagaaacctaaagttgctcaaaaaacataaagtctattaattaaaaacaaaacaaggccaagcgtggtggctcacgcctataatcccagcactttgggaggctgaggcaggaggatcacttgaggacaagagttcaagatcagcctggacaacgtggcaaaaccctgtctctacaaaataaaaaacaaaattattagctggggtgtgatgacaccggcttgtggtcccagctactcaggaggctgaggtggaaggatcacttgagcccaggaggtcgaggttgcagtgagccatgattgcgcccctgcactctagcctgggcaacagagaccctgtctctaaacaaaaaaaaaaaacaccaaccaaccaaaaaaacaaaacaagacaaaacaaaaaaacaccgccagggcggtcgggcatggtggctcacgcctgtaatcccagcactttgggaggccgaggcgggtggatcacgaggtcagaagatcgagaccatcctggctaacatggtgaaaccccgtttctactaaaaatacaaaaacagccaggcgtggtggcgggcgcctgtagtcccagctactcaggaggctgaggccagagaatggcgtgaacccaggaagcagagcttgcagtgagccaagatcgtgccactgcactccagcctgggcgacagagcgagactccatctcaaaaaaaaaaaaaaaacaccaaggcatggggagggaaggtgaaggctgtactgcggtgtggagcacgaaggcccgcagggcaggggcgaggctggccctccgcaggtcccatgtggccgggcctcagggcgtggtcttgggggtggtggtcctggccgagatgggaggggctacctgtaaggatggactgtgggcgattcgcttagggatgatggtggtggtagtcttggacgccatccccgacaatgtgcgtgttttcagctgctggccacctggctcagggccgttggaggactggctgccgctggccgcaagggtcctcttggcacctgtgggggctggcggggcacagggggtgtgggcacagggcgagtggctgcccatcaccacgtggcggagcaccaggcagccgcggccgctcagcgccagcagcacgtgcatctccgcgtgcagggggccgggccagggtgaggggctggggctgcgcaatggcatcaggctctagctgccttcaggcaagtccatcgaggcagaggacacaggtcaggctgcggaggccgctgaggacacgtcaccggtggggtggtccaggcctctgccacgtgttctgaccccaagcccaaggcgtcgatgtctgagggaaaggccctggctcccggacagaggaccgaagggtctcgggtgcccccacctgctcattggctttgccctgccctgcggcctctgtgttctgccttgccctttgatgaagtcacaaaccagagggaggaggccaggcctgcaggggctgcttcggagggctggccacgcgggcagctgcaacctgggcatgtacgtctgtgtggcaggggggcttctggactgggggctcggcaccgacccaggaaggggagctgtgagcagggacatctggccctagtctcagagcaacatccctcgaaatgccatctggccctggaaggtgcaagggaggcaggatgagtctgctcatgctaccgcgggccgcccagcaaggaagcaggctgcccgccaggctggcacgcgcctcttgcagtggagggtttgctcttcaggaacggacagagaacctccagactccctcggctgcacgctgggggcgagcccaggcagccacaggagtcctccaagccagatgagcccgccctgcggcactgccagcacttgggacgccagactcccttcaggcggcgggccccaagggcactgcgacagctcagcacccaccacagatcagcaacaggacaacccgagcgcggagacacagacgggaagcgtgtggggtcctgggataggcccaactcaatgatttcccctccctggggctaaggtctcagccgtgagggggctctggggaggggaggtcagagtagcctggagagctctccctaaggagggccgtgggatccatgggatctgcaggggaatcgccggggctggccctaaggctctccagccagcgccagggaggcaggggctccaaaccagcaggctgctcagggtggtcctcggacagcagccatgccctcccagggagcttgccagacacacagacctttcccagcctccagaccagaacctgcattttttaggagctttctgggggaccctcatctgtgacctgcctccagggatactttctcgctctacagacaccactgatgtgaagacgcaggagacaggacaaccccccgtgaagggtcctgtccacccaccactgaggcctggcccgactttctacaagaccctgctgggggggaagtgcccctcggagtaaaggaaatacagccccactcctgggaagacagcactcatttccatcagaggccacgccccccactcacacgccaggagaaagccacacctgcagaagcctgctccccacccaatgccaggtaccccgacatggctccccattccctggaaccacaggctcaggccctggttcagcccagtccccagcaggctgttggactcctagtaaccccggagctgggtcagggaaggaaggtgctgggccaggcctcctgcacccctcaacagtccccatttcacagacaggcaggctgagggccccagggagggggcccaaagtcatcccatgagcaagcaccatgtggttcaggtgagctcagagacctcagggtgccacctctcctgcccacatgcccacggccccccggcacaggccccctgggccaggactcacctgcagccaggcgggggttggggatgtgggcgatcctcctcttctcgccaggggcggaaatgtggacggagggcgacttctctgccagcctggcgggggcctgcagcaagctcgccgatgccctctgcgcctgctgggcccgcaggtagcacacctcctgcgccgtcgggggccgggccgggggcaccgcgggacccctcctcgggggctccacctgcgtcaccacaaatgctaaggcctggcagcacagcgggggcacctggagcaggcgaccccgggcaggcttgggagagggtggctggagctcgggggccggaggcaccacctccctggctgccttctgagctgctgggcacactggggggaagcagcagggggcagtggtcctcaatgccatgtggctccaggctcccccactcccagtgtctcccggtgcccaggctatgtcctcagccctgataaggcacgggtgggcgggactaccccgattacactggcactccaatccaatcccactacgcctaatcttcctcaaagcccctcctctggggaggctctgggactggagcaactgggactctcctggctgctgaccccggagccaggctctctgcttgtcctgcactacctcgccacgtctgcacaggggcctgacaagcgctactgtctccgggctacagaggacactggagctcagagctggacaaccggcccaggcccaggccgcacacggcgcagcaggccgtctgccgcactctgggggaggtcaccctggggctgctgacctgctctgtccctcgccccagcaccgtggcaatctaacaggaaggggcagggccagctccctctggaactcgggcagcgtcaaagataaggtgtcttcaaaaagctcatggaaaacgtgcgttgtgacgaaacttgcatggctttcaagtttttttgccccaaaataaactgatactaacttgtcataacatgtctgaaccagacggagtttgaggcactaaaaaaaagtaagacatcagttagaacagagccccagtcagagcaacaggagttctgctaaaattgaagcaaatgttaagcatcaaatttatggtaaaacttgggtggaagaacgaatggggaaatcactgatgctttacaaaaagcgtcacagatttacaggaacaatgtcccaaagaaatcagaagtttatgaatggataactcattttatgtatttatctttttgagacagagtcttgccttgtcgcccaggctggagcgcaatggcacgatcttggctcattgaatcctccacctcccgggttcaagcaattctcctgcctcagcctcccgagtagctgggattacaggtgcgtgccaccgcgcccagctaatattttgtatctttagtagagacggggtttcaccatgttggccaggctggtctcgaactcctgacctcgtgatctgcccacctctgggcgcagtgcctcatgcttgtaatcccagcattttgggaggccgaggtaggcagatcacgagaccagtctggccaacatggtgaaaccccgtctctactaaagatacaaaaattagcctggtgtggtggtgggcacctgtaatcccaggtactcgggaggctgaagcaggaaaatcacttaagcccgggaggcggaagttgcagtgagcagagatcgtgccactgcactccagcctgggtaacagagcgagactccgtctcaaaaaaaaaaaaaaaaaaaaaaacaaccaaaaaacaaacaaacagaaaacagagggatgaagctgggagcagtggctcacgcctgtaatcccaacgctgggaagccgaggcaggaggatcacttgaggtcaggagttggaagaccagcctgggtgacaaagcaagaccccctttttttataattttttttttttgagacagagtcttgctctatcacccaggctggagtgcagtggtgcaatcttggctcactgtaacctctgcctcctgagttcaagcgattctcctgcctcagcctctctagtagctggtattacaggcacccatcaccatgcccagctaatttttgtatttttagtacagatggggttttgccatgctggccaggctggtctcgaactcctggcctcaggtgatccacccgccttggcctcccaaagtgctgggattacaggcgtgagccaccaaaccaggccaacctcgtctttaaaaaaaaaaaaaaaaaaggctcctgctggcctggcctctgcggaccttacctcctggccttgcttggaaaggtgggagatcctcctcttctgcccggggaacagagtggtcagacccgaaagccccttctcctcactcttctcttccttggggggctaagacacatgtccgtccgtcagcacaggtctgccctcgctgccaacaccaacacaccccaacctcaaactgcccccggcaagtggggaatggaacagtccagcccccaggcacagcagctgagggctcagggccaacagtccctgggctttgtgtgggtgcagtcggaggggtgggcaggtgtcacacgttctgcagatgcccaaggctacctctcctgggcacccagggccccagcttggagaccccagggctgcagaatgaaagcacactgggaaagcgaggccaccttgggccgaaccagctgctgcgggctgagcacttgggctcagtctgtgtggagtgagctccccctggtggccaatttggggacacggggccaggagacccaggggtccagggctggcccaggagagcaagagctcgccacgctgggagtagggaggagggaggggaggagaaaggagccggaggggatgaggaggaggcaaggagaggagacagaggagctggaagagaagagacagagatgggggaagggaggaggggagaagagagggggaagggaggaaaggggaggcgaggggagaggggctagaagggtgtgccggaggtggattcccctgaggtgggtgggtgggccaatatccccctgccagtcagtgggaacagaccgtgtgcacgtggccacagaagcctggctggtggccacgggccagtgacctctgggtgggtgaggggcaacaggagcaacagggctgcccgggtgctcctgagctcctgagatttcaacgggctcagggaccagcactgaggagctgcctccaccccgtgcctccgagccaactggaaaccactccagatagaaggtctctcaccaggccctcggctctgcctctgcccgagcccagccccagcacccgcgcgcctcacctgccgggccagccggcctctgtcctccgtcttgacgctggtggactcgttgaagatccgcaggcactcctccatggggtcggagtcaaagtccacctccttctccagggccgagtagtccacatccgcccccgcgctggaggtggaggaggaggaggaggaggaggaggatggggcgggggaggggggcggggaggccttgagccgcttgggcggcccctgcgcctccgggaagcccaggctggagtctgagtcggagtctgagtccgagctgaggctggggagggcagagggccacacgctcggcacccctggccctgcggcctcgtcctcactctcgtccccaaagaggtcggcgtggctcagggcccgcttcttcagcttgggggcgtcctgggaggcgccctcgtctagtgagcgggctttccgctccactagcttccccgacggggccttggtgctcttcctgtcgggcagctggagggggcggggtgggcctctgccggccgccggtcgggagtccccgcttgtggggctcggccgccgcgctggccggtcaggcctccctttccctgaggtggccacaggagtggccgaagatggcttcttcttggtcccttccggccgctctgccttgcgccgggggctgctggcctgcgggcccttcttgtccgcacggggcttctccacaggccgccctcggcccttgtccttggtcttgtccttcccctgggccccgtctttgcagctgggggcaggtggggccccggtttttttcttcttgggttttccctccttggggcagcccccatcctgtgaggactggacctgggctggggaggcgggcttggctgggggcggctggaggtcccccacgtcgcactgcacggccgtctccttggtctcccgcaggccgcccccctcggcctccaggccctctttggagggtggctgcccggtggccttgatctcagggtcggccctggctttgggggtgctggccgtggtgggctcgttacctgggaccgtggcggcctcatcttctgagtctgagaaccttgcatcgcaactgccaaaggggtcacagagcttcttgggagcaggtgtgtagggctcactgccgcgggagccccggggccgcttggcggcccgctcatcccgggagctggccctgctgaggtgccgggccgagtagttggagagagggtcatactccaggtctgtgggtggcctggagttgtccaccacgtacttgccactgggaacggggcggctgtgccgccggggctggctcacagccttggggacgtattccagggcaccgccaccccctccacctctgccctgacccctgtccagggacgccagcgagtacttgctgcccggctcggcaggggcggccagtggggtgggctggtagccggcatcagggcttaataggccgtggctgccggggctgtagtcgaaggccagtgggaaggcatcctcgtccgggcccacagtggggctggcgttggggccgcggggcgccagggcgggggcctcggcggagcggtgctcacgggtcgtctccagcagctcccggtagcgccgctgctccagctccacctcactgcgcacggcctcgatggcctggttgaccagctccaactccagcacatccgggcgcggctcctcccccaggcccagggtgccattctccctctgcgcggggggcttgggcagctcagggttgtaggggtcgtaacccagccctgaagggaacagagagcacagctgtgaccagcctgccggagaggagcccgcagcatgggggcggccccggtctcaaactgcagggaagggaagagacctgcctccgaaacccaccacgcactggcgcccgccaaggctctggggtgcccagctgggtacaggccatggcgccatctcaggccctgtgccgggccccgccttgccctgaccaatgggcgctggatgggcctgggctgcgtgacacacagctccctgggtactggaggctccctcacacggctcatgaaatgcgcacaatgaccatggtggggtggacactcgacaggctggaactccccggggcaggcgggtgtggagctcccagcattcagggtgccgggctgaggcaggactgggctgggccgacaaccacagcctgacggtggacacaggagagcccttcctcagccaacacggccccacccagccagcagtgtgcccgcggtgtggcggaggtgtgccagcagtgtgccagcggtggtgtggtggcggtgtgcctgcggtgatgtggctgagcagggccgggggatggggacatgcccagttgatgggccaccctgcaaaatccacaggaagattttttttttttgagacagtctctctgctgcccaagctggagtatagtggtgcgatcttggctcaccgcagcctctatctcccgagttcaagcaaacctcctgcctcagccccccaagtagctgggattacaggcgtgcgccatcacacccagctaatttttgtatttttagtagagatggggtttcaccatgttggccagtctcgaactcctgacctcaagtgatccactgcacctggcctactttaaattaattttttaatttcaaaactttttgtagctgggcgcggtggcgcacgcctgtaatcccaacattttgggaggccaaggcgggcggatcacctgaggtcgggagttcaagaccagccagaccgacatggagaaaccccgtctctactaaaaatacaaaattagccgggcgtggtggcgcatgcctgtaatcccagctactcaggaggctgaggcaggagaatcgcttgaacctgggaggcagaggtttcggtgagccgagatcacaccattgcactccagcctgcgcgacaagagtgaaaccccgtctcaacaaaaaaaaatttgtagaggtggagtctcaccatattggccaggctggctttgaactcgtagactcaagcaatcctcccacctcagcctccaagatagctgggactatagcccaagctgctgtgcctggcttaaagcacacggctgaaatgtcttcccggggggcagctgggaacatgagactcgcatgttatttacgtggttccagaacatagtgtagcagaccctcacaacctcaatgccaccaacgtcagcacagaagtcagaaccacagaagcctcccgtggggacaggccgaaggagtctaaagaaaacatgagcaagtggagcccagtattccagcgaagcaataaaaaccaagttcaaatatttactccagaaacttggaagttgaccattagaaattctactgagcacggccaggcacagtggctcacgccgatcatctcagcactttgggaggctgaggcgggaggatactgcttgagctcaggagtttaagaccagcctggatgacacagatcccatctcttaaaaaaatacttaaaaataagctgagcatggtgatgcacacctgtgctcctagctatgtgggaggctaaagtgggagaatcacttgagcccaggggcttgaggctgcagcgagccaggattgtgcctctgcactctggcctggacaacaaaacaagaccccagctcttaaaaaaataaaataaagttccactgaatgtaattccgtaacatctctaaaggtctctaaaggtcaacaggtctgatcctctggagttggcaggaaatggcgccaaagacgtctgcgtcctaattcctggaacctgtagatggtatatccccttagatggcaaatggggctctagatggggtgaaatctcccttgcccgtcactgagggggccatggacaggccgagatcttgcagagcagtttcgcaaccatcccatgcagcttcaacaccaccaccttcagactcggaatcctcagaacccgtgccacagacagaccgcacagggcaggtacagatgcgtctggtgcagccttcactgcaaaaacacaacaataaataacgcaggagatgacctagaagccgaaacgcaggtcacctgtggttaagggggaggcgtgcgccctggagggacctccaagtcacactgctatggggaagaagaggggcaaggaatgttgcacactctcacctttgaaaagcagctccacaaacccagtgagatcagattccaacaaaggcgcacgggcccacaccaagcccgcagtcccatggggtacagcaaatgcaatctggccttcatttatgctgcacccaacaccaactgcccaagagggacgtgaatgctgacacacatccccgacaggctgataaggagctgtgacaccatgtagcaaaaggcaacagccccatgggaacctgcccgcaccaagacgccacttggctctgacttgattctgactgaacgtgcagcttgtctgaaggtcgggcctcaggtgtgtttcttccactcagaaaacctgcctgcccttcggcccacctggagatcgacccccacagcgtgctaagacttccgtgcagagaaatggctggacgcagccaaggggaggcaggcacaagacctcccactgtgggcgacgcagagaacagcaacagaactggaggcttcccctatggcccccacccacaccccctcaagccccagcaggcataagaaagaaatggctggtttcggccggttgtggtggctcacacctgtaatcccagcactttgggaggctgaggcgggcggatcacctgaggtcaggagttcgagaccagcctgaccaacaaggaaaaaccccatctctactaaaaatacaaaaaaattacccagccgtggtgacccatgcctgtaatcccagctactcgggaggctgaggcaagagaatcgcttgaacctgggaggcggaagttgcagtgagccaagattgagccattgcactctatcctgggcaacaagagcaaaactccatctcaaaaaaaaaaaaaaaaaaaaaagaaagaaaaagaaaaagaaaaaaagaaatggctggtttcccaagctgctcccccgagacacacccaccagcagaacaaaagcctccccaggtaagtccccatcctaatccctgggacctgtggccaggccacctcactcagccaatagactgcaggtgcgacttgaacaaaggaccctgagggtgggtgaacatcttgcattatccgggaacccagtgtcctcacagggtcctttaaagagggaggcaggagggtgagagtcagagagactggaaaaggctgtgctgtgggtttgaaggggaggaaggcgccctgagccgagggatgcaggtgcctccagatgctgggaaaggcgggcactgactctccccggaagccttcgggaggcccagtcctgcccacagcttgacttgagcccagcgaggctgactttggacttcccagcccagcgctgagagagagtgtgctgctttaaggcccacggggacgaatgcagcctcaccgggtgatgaaagtgcagtggaaaacagctgcccgctgcctgtacctgcgaaggcggaaggcccctcctgttcccgggaaccctgcagggacagcgggaggccgggacccggaggctgcagaggaggtgggaggaggcctggtcacgggcagctgccgcctttcccttgaaatcacagcagtgttgtgcccatctttaaaattacatttagggaccaggcacggtggctcacgcctgtcatcccagcacggtggctcacgcctgtcatcccaggcacggtggctcacgcctgtcatcccagcactttgggagaccaaggcgggcagatcaccagctcaggagttcaagaccatcctggccaacatggtgaaaccccatctctactaaaaatacaaaattagccaggcatgggggcgtgcacctgtaatcccagctactgaggaggctgaggcaggagaatcgcttgaacccaggaggcagaggttgcagtgagccaagatcacaccactacactccagcctggcgacagagcaagactctgtctcaaaaaaaaaaaaaaaaaaaaaaattacacttagtgccaggctcagtggctcacgcctgtaatcccagcactttggaaggccaagatgagcagactgcttgagttcaagaccagcctaggcaacacggcgagaccccgtctctacaaaaaaatacaaaaaatgagctgggtgtgatggttgcatgcctgtggtcccagctacttggaaggctgaggtgggaggatctcttgagcctaagaggtcaaggcttcaatgagctgtgatcacaccaccgcattccagcctgggcaacagagcaagatcctgtctctaaaacaaataaaattaagtagcatttagacaagaggaaggatccgtgtgtctgttttggaccactcggaactccgcgggactgtgtggagggccacgaggtacgggcaggcaggggaacatcacacagaagccacaggttcttctttgcctgtgccaggctacagccaaggcatttccaggaaacgtcaccccatgtgcccagcaggcgcagaggggcccattctggcaccatctcacagccaaggaccctgggagtcagcgagggcacccaactaggatcagcaactgtggctgccagttcctctgtgcggggagggacagctgccaggccaggaggatgctcccggcagggaaacggccggctggggctgggtgtcagcccccacccagggggagggctgcggaggccagcagcagctcaagggcgccctcccggcccacttcactgggggaggctccggctcctccctgacccagccggctgcagagcacgccaccctgccacccgcctggtgaacagggcaactagtgccagccctcccccagccccggaagcccggctgcccagtgacgtggaggggccaggccaaggccactgtggcgtgagctgcagagattcatgaaggggaggtgacagagcacaattactgaggaggagcaaggccaggtcagggagacactggtctcccctcccaaggctccagctaacggggatgcagagaggaggaagagcccgcctaacgggaaggctctcctccccaggcaggggtgggcagcagtgagactgggccccaggagggcaggcgggggtggaggggactgaggcatctctaaggggctaaggataagggactccactcaggggcttccacctccttgtcctggaccccagggctctaagacacagcctgcaagatcaacccagcccaggggagccaagagtcacaggcaatacacacaccagccagcagacacccgcgagcccttcccaaaggaaggaaattcagacctctggacattgtggactctgaaaggagagaccatttccccaaaaggtgcttttggaaggtcttggaaggaatagcacctgcctcccaggagtggagccaggcccccaagcagagcgcaggacaggtgataagggtccaatctgggggacgtgggcttgtctttctaactggaagcctgtgtgagtacttgttttgttgttttgtggagacaggcattgcccaggctggagtgcagtggtaccatgatggctcgctgaagctttgcctccccggctccagcgatcctcccgcctcagcctcgcaagtagctgggaccacctgcgtgcaccaccacatccagctaattcttttctttttttggtagagacgggggtctcgctgtaattgcccaggctggtctcaaacttctaagctcaagcggtcttctcgcctcggcctcccaaagcactgcttgtcttttaagggctgtgaaacctgccccagcctttagccaacagatgggaaagagcaggggcacctggaggccggagggcacactctgcagagggggtttcagcattttcactcccgggtggaggctgctaccacctccacaaagactgcaccaaaaagaaagcaggcatgctaggcgggtccgagaagactgagatcaggatctgcaccacggcctctcctccctgtggtcactgggctcccccaccctgcagcctgtgacccactggtgctggaaggcagcatcctggcctgggcgctccagccaggtctggaagtttcacacaggaagttgcctggggctcggccatggctgcctgcagctcagaacagggggtacggcgtgctgagcccctgaaaggtcacctgaagctggtacacaccactgcctccctggacctccctgtcccaccatgcctcagagggttggatctgggtacctgtcaggactggaaaggccccagggtggcatgtgcatgctgctaggtgccctgggagcccacccagggggtcacatctaaaggccgagtttgggccaggcgtggtggctcacacttgtaatgctagcactttgggaggcggaggcgggaggatcaccgaggtcaggagttcgaaaccagcctggccaacatggtgaaactccacctctactaaaaaatacaaaaaaaaattagccaggcctggtggcaggcgcctgtaatcccagctagtcgggaagctgaggcaggagaatcacctaaacctgggaagtggaggttgcagtgagccgagaacgcaccactgcactccaacctgggcgacagagctatacatgcatacacacatacatacatacatacacacacacatacataaatgaatgccgactctggaagtaggaggggcccgtccaggccccgtcccacggctgggaattactttggataggagcaggtgggctccttcctggatgtggcccaggtcagtctgtttctgggaaacatggtgaattggctgacaggaaaagcctacctccagaggcctgggagctgccccttcctccctgcttcaccccaaggccaggactgggaggtaccacccagccccagtggtcctgagaggccacaacgcctggctggctatcttccccagcctctccagccagggctcagcccagggcaacgcagcccagccttgtcccggcctaggagagagcccactccctacaccacccatcctgaccgcatctcctgagaccagtgccctgcagccccgggacgggctggatgacaaagatgatatttcttcccagggttctaggtgtggggcctgggaccagcactatctgcccaaggccatctcctggcccccaaaccttcccttggcccagaaacccctcaccctgggcatccactctcctctctgctcccactgcccccgccccaccacactcaatccacccacacagctgtcctgtccccagcaatggggagaacctggcatgagctccaaccccacacggagactgaaaggcagcaaaaatgacaagatcatggagcacgaagatcccaacctgaacttccagaacgttctctagtgagacccgtccaaactcctgtcttctctcagtcagcccatttcaaagatgaggacacccagtgccagcgagagccggcagctcctagccccacaaggagccccaggcccctcccacccagacggggagactcagtggctctaaagaacccggcaggctggctggacacgatggctcatgcctgtaatcccagcactgtaggaggccgagacgggtggatcacctgaggtcaggagttcgagaccagcctggacaataaggtaaaaccccgtctctactaagaaaacacaaattagccgggcgtggcggcaggcgcctatagtcccagctacttgggaggctgagacaggagaatcacttgaacccgggaggcggagactgcggtgagccaagattacgccatcgcactgcagcctgggcaacagagcaagactgtctcaaaaaaaaaaaaaaaaaaaaaaaagaacccggcaggcccagcccctgctccggacaccgttcggtgggcccgcagggctctcaacgcaaccaggcatcagcaggactggcccctccagcccaggcagtgggccccgcatgctggcccagaacaggccaggcagagaccccagatggaaacagacagtccctcccgcctggggcttagctggacaaaaaagataagcctgacactgcggcatgagataagcaagactacccccaacctagcccctgggggagccatctgggcggcctgaggctttgaaggtggagacagaagaggacattcccaaaacagccacagcggcagagaaggcacggggctgaccctcgcgaagcgcaaggcaggggctggttgtgtccacgggagcgcccatcccataacagaccctctgggaagaggggtctggaggacagcacccctgaagtccacctcctgcggacggcagagtaaccataaggtccccacaaatggccatacgtccactctgggggtccctgctcctggggcctcccctccaaccctcacagtgggacgtcctccagccccatccttggacatgcgggcgcccggggccctccatgcacagcccactggacagataggaacccgctgctcagaggcaaagggaccagcactctgcacccagaggaggtcccacagctcctagaccacacggggcagaaacagggtcacctggagagggcttcgaggaaaagtccagccagtgccgggggcctggacctccaccacccagcagcttccaataccctctctgaaatccaaggtggcccagctctgccccaccccccacaccagactccacccaggtctcagagcttgctgtggaggctgggctgtgcctgcagcagcggcacctggggtctaccccactgcccccagggttctcctcgacccccagggctgcgatccgagcctcccctctgctccaaggcaccgccctccccacctcgacagcgcagtgtgcagtgccaggaccgcccagcaggtggagccacacggcagggtccaggggagaaaaagaaaaaggtcccggcctgaccggggaccaccagctctgctctctggggcgtcctgggcatttattcacctcatggggcggccgtccccacatgccatgactggacgcgctgctgtcccaaggcttacagctcgaggctaggggacagggacggtaaccaggacagaggtcactgcctttcaaaacaatgtagaaacaggctgggcgcagtagctcacggctctaatccccgcgctctgggaggctgagcccaaggccgaggcaggtggatgatttgaggtgaggagtttgagaccagcctggccaacatggggaaaccccgtccctactaaaactacaaaaaattagccgggtgtgggggtgcctataaccccagctactcaggaggctgaggcaggagaattgcttgaacccggaaggtggagtctgcagtgagctgagatggcgccaccgcactccagcctgggcaacaagaacgaaactccatctcaaaaaaaaaaaaaaaaaccagctgggcgtggtggctcacacctgtaatcccagcactttggaaagtcgaagcgggcggatcacctgaggttgggagttcgagaccagcctgagcaacatgcagaaatcctgtctctacttaaaaaaatacaaaattagccagctgtggtggcacatgcctgtaatcccaggtaatcccatgcctgggcgcagtagctcacgcctgtaatcccagctactcgggaggctgaggcaggagaatcgtttgaactcgggaggcggacgttgcggtgagccgagatcgtgacattgctctccagcctgggtgacagggcgagactccttttcaaaaaaaaaaaaaaactgaaacagaagggtacaaatggcaaaggacaagaaccggcagggaggagccagcgggaccttctccccctatgcctctccatccctgccaagagcccaccttggctgtgagccactttcatggtccacacagagtaagttaagagtccagctctcagccgggcacggtagctcacgcctgtaaccccagcacttgggaggacaaggctggtggatctcttgagcccaggagttcgagaccagcctgggcaacatggtgaaaccctgtgtctactaaaaatacaaaaatcagcagctgggcacggtggctcacgcctataatcccagcacttcggaaagctgaggcgggcggactgccttgagctcaggagtttgagaccagcctgggcaacacggtgaaactctgtctctactaaaatacaaaaaattagctgggcgtggcggcgtgctcctgtaatcccagctactcgggaggctgaggcaaaagtatcacttgaacccagcagcggaagttgcagtgagccaagatcacgccactgcactccagccagggcgacagagcgagactctatctccaaaaaaaaaaaaaaagagtccagctctcagctcctcctcatcccagggccttttctgtccccaaaggacatttcccagtgggtgtttctgggactcctgtgctccccgtcaggcacagaggactaaaagcatccaggagccctgcagcctcttccaggggctcacagagaagctggagtgggcacctccacggggcgctgcccctcagccaggggttcacaggctgttcctaggatgggtgccgtggcgcctaaggaggaacccacacaccagggtgactgcaagcacaagctgtttttgttacttggtgacctgtgtgcagatgctggggggacggggtgctggctggcaatgtgggccgaccccggccccatcattcattcctccagcacatgttctctgaatacctgcccaggacctcagagagggcacgcagcctgcagggcacaaagggcagggccctccctctctgtctcatccacttccccaaagtccacttcctccaggcagccctccgaagtcctccctgcagaagcagcagtgcctggcatagtgcctgggatacagaggtggaaggcatggtggagccctcacctcactccacctcctcggccgtggtgcacggggcggtggccaactcaggactgcgcaggcccacttccatggcttccagatcctgtctccctagggcctgctcctgaggcagtgctggctcccttttggtctctgagggcctctgagccactgtgagaggaggagggaggggtctcagaaaaatggactgtgacccgtgaccgttaacagggtggggatggacctgtcgccaggacaaatggacaggctgggaagccacagggcggggatacgcctggagtgcacgccaggcccacacccccaagcacacgctctctgccaccttcctggccctgccccctgccaggctcttctgagcaccccagcgtcgacggagctggcccagggcaggtgtctgcagagatctgaggaaggaaggaaagtgggaaggggaaggaaacactgacccagaggcacgggcccctccacacctgcagcacaccgactctccagacatgagtctctgtgggaacaggaagagactccagaaagctgagaatcgcagactgcccaaccgcaggagcgctcccaggctggggacagatgagacagcatatcaacagtgagccccatcggcggcaagctcccaagcagccccaagcccagagcaggagaacatcccaggctttcctcgagctgtctccatccccagagcccacagccctaatcccacttccagccacaggcaaactcctattcatcctccaaaacccagcccagtaatcctgtgtttggaaacactcgccccacccccctgcaactctgagtgacacccgggcccgccccacgtcacccctccactccctgcaactccaagtgacagctgccctgtctcctggacccgggcccaccccacatcaccccctccgcttctgcttcccgagtcccctcagcctggcgccacagacactgagtctagatggacccagacagggccttggagggcaccaggaccagctcctggctttacagagaacactgaagtcctgtggtgtgtgtgtccaggctcagcccacagctcgtcccgagtcctcccccaaccactcctttcctgaggccggaagcaggggcaggtcccagaaccccgggctccaggcacgcagcctgtcatgggacgggaggcgctccgtcctcgcagccgttcccaaaaacctctcggagcctaagggagggatcgccccgaaacagccagtgcacatgcggctcctccaagggtcccagaggacttggctgttagaggaggaagaggaatggcaactcgagaggtccccgtgaggctcagggacccccaggattgccctgacagtctcccttctaccctgtttattttcttttcaggtttttgctttttgttctgcagcagatcataccaacagaatctacccactgcgcggacagcgtaaggaacaagccacggccgggcgcacccagcgctccccggaaacctgcctgctcctctctagggattgctttgcagaagggattctgagggtggggaggagggcggaggaggacagagttttctcgtcaaagtgaggcctgctacagcacagcccgcacgacgcttcccgtcacactcagatgccacgaccccatcgtgcagaagagctcgcagaggccgagggaggttcaggaggcaacaggctcaagggggtaacgcccagcaggaggaggccggggccttcctagcgagctctgccccacagaaagccaagcaagacgccttcattccggggtacggtctccagagggacagaggccggccactggcacctgaacctccagtctgcagtccctggaggagacggtaaagctgcacagggctctggggggagcgctctggggagcggctcaggcactgcaagagtccccggaacccctcccagcaggcacgcttgtccccgctgaccccagccccagcgagctgctctgcctctcccatctcaggctctgggggcagggacggtgcttctcagggtctctgcctctccctacaggcagagcgccagctcagccatccctctcgaaaacacaaaaacaggcccagcacagtggctcacgcttgtaatcccagcactttgggaggctgaggcgggtggatcacttgaggccaggagttcgagaccagcctggccaacatggtgaaaccccatctctactaaaaatacaaaaattagccaggcgtggtagcaggtgcctgtaatcccagctacctgggacactgaggcagaagaatcacttgaatccaggaggcggaggttacaggaagctaagatggagccactgcactccaacagcctagacgacagagccagattccgttgcaaaaaaaaaaaaaaaaagcagcagcagcaaagaaaacacaaaaacagcaggcggggccgccagaccggcatcctcatcctcaggactactgccccaagctagatctctgtctgtggggttgtccccagcactgaagggtgctgagcagtgcccctggcctctgccctctctgtgcctgcacccccaaactggcaaccaaaacatctccagacatctcctaacattcccaaggtgcagaaccgccctgtcgggatcagtcactgctctactgaagacctaagcaaagaatcctaaaatatgaataccaaaaccagcctcgactggcacggcccacgcctggaggcagctccgggcccagcagccaggttttcaaagctgcccaggcgctccggaagtcaggtgaggacctcagaaccttgggaaaagcccccccaaaaaaacagaatccaacctcatctgtgaggcagggtcccagccatggctcaagcacagcaagcccgggacctctggtgtggagtctggaggaggcccggcaagcggcctggtgccggactcggcaaaggaagccacacttctcctctggctcttccgtattctctgatgtttctaaaacaaacatttccccaggccagaaaatagtaccttcaaaagtaaagcacccagagacccgtggcaacacggacaggcccccaggccctgggaacccagcgcttttcccatcgccatccacctgggggagagctgccagcacaatcctgccagcatctgcaagaaggcggctgctctggaaaccccaggcccctttcctctaaccccctccacacaggaacatcaagagtcacggggcagcagagccacccactctgtggtaggagtgtgggggagggctcctcctcctcgaggccagggcaaagcttcaaccccccgcccggagggtcccagctccccgggcccagagccgcagctgggcgaagcttcaacccccagcccggagggtcccagctccccgggcccagagccgcagctgggcaaagcttcaaccccccgcccggagggtcccagctccccagggcccagagccacagctgggcaaagcttcaaccccccgcccggagggtcccagctccccagggcccagagccgcagctggactcgcaggctcgccggcgagggctgaaaaagaaacggcctcagcaccaccgctggttgtcaccactggggtcagggaagcccagggacgctgctcaacatcctacaacgcaaaggacagcccaccagacgacaatctggcccccagtgtccctagcaccaaccgtccctccagcaagctccatagctgccactccaggccaggcaggcaggcggccccggtggcccgattgcccacctgccacccgctggtaaaatcacccccgggtcctcatacgccctggtcaggcctggggaaccaaaagacaatactgctggctgcgggggttctcccctagagtccattccttcctggacgcggctcactgaggatgaaaagtcggaccgaggagagcacacactgtcacgtctctgaaggtgacacaggtggtcagacggtgccttcactgccccacggaaagccggctgtctcccatccaccaggaggaggcagcacaggacgcagccagcgggagctcctgaccctcctgagaggccagaggaaatgaaggcaagccatcctctgcagcgaggcgccattcttggcctccttctcccttctcgcctgactcggggcctcagagtttccgaggagagctggcaagccctaacagatcagtaggatcccagggctcacctgcctagcaggggtatgggaggctgtcaccgacaccggagagccaggcctgcttcaggcccatccttggaaggtttcaagttcccttctgtgcccagcccacagaggctggcagcaaaaacggcagaggaggcaggcagggccccggcccacccacatccaacccagcactgccagttaccagccacgcgtacacaggtgagcagcctcccggcgctgggcctcagtttcctcatctgtaaactgggaagagccactcccactgctgtttgggggtcacaggcagagtccgcccagtactgctgtggtagtggccaagtcaagaggtagggaccccagagcccatgtgaggggccacatctgaagagccagaaggaggaggacccctgcctgacccgactctgctagaaggctcaggagatactgggtacatggtggctgggcttcaggagatattgggtacacggtgggtgggcttcagtagatactgggtacacagtgggtgggcttcagggctccccatgtacctggggctgctccctgagcgcctctaccccaggactcctgccctctacagatgcagttctggagagtcgcctggagccccagctgggacgccgccaacagccccacccagaaccactggcaccgggctgccagatcctgaacccgactgcgggatccccgagggcaggagctgtgcgccccgcacacacgtctgccgctcactttgcagtataggatggccccttccccaggcctgggactgtcctgctggggcctgagtcagcctgtggcgcagcactagcatcccctcaacgtggtgccctcagcctctgcctccctcaggagaagcatcatctgggagcacgttcctgccggagctgtgaagccctgagctggggcccaccgcacctctggagagccctggactttcctgcaatcctccccggaagggttccctctcctggaagacagtgtcctgcctctcagtaggacacagactccctgagacaccacagggagtgcggggcagtgggcagaggcctgggttctgaggtcagatgggaggaaggtgggatctagccctgcccactccacatagacaaccgaggcccctcacctaccaccaggctgcagccaaggcccaggcagcagagagcggccactggggggatagtaacgctcattcccaactcacaaggctgggatagaacgtgcccctctaggccggggatgcacatccctgcgtcccagggctacacggtgcccgccgtaagggctgctggaccatccctccaagccaccctgggcaggtccagccggctctgaaatggctgtgcagcccagcgcggtgcttcacgcctgtcatcccagcacttcaggaggctgaggagagaggatcgcttgagtccaggagctcaagaccagcatgggcaacaaagtgagaccccgtctcggcaaaaattttaaacattagcgaggtgtgatgtcacatgcctgtggtctcagctagtcaggaggctgagccaggtggatcccttgagtccaggaggtcgaggctgcagtaagctgtgatcgcaccactgcactccagcctgggtgataaagtgagaccctgtctcaaaaattaattcattaaataaaatggctgagcaggtccagggataagagcccagaaggaaacctgagtccttcagcagtgctgctcaaggtcgccaatgacccgctgagcctgtgacccagggcccaggagcaccagccaccttcctgttcccgtcgcagctccgccaagcctcccaaccctgcctgccttggtgccctcatcagatgccctctccttctcccagaggccctggaggctccagccctgccctggccaggtggtagtatgggcaaaacacgttcctcgataagcctccgtttccccaccggcagcaaatagctcacagggtcaccatgcagcgcgtgtccagcacagagcatggccccacaggtgctccagggctagctgagggcttttcacctgaacctctgtccactctcaatcctgggaggccagcgttcctgtctatctcctctctggaggccgctgccctgtgcaccctaaaatccccttgagaagacatggcaaaggctagatcacgccagcctcttcaaatctcataggaaactgggtgtgtgtaaatctggaggtgtggacatgggacatgcatccccccctgtcctcagagggcagcctgatgaacatgtcacggaggcggaaacagagggtcagagaaacctcaccgcaaggaagatggatcctgccttctgcggggggaggcagtcttctaccagacagtaacaagaagccctaccaccccaccagagatgggaaaaggagttcattctcaccagcaaaagggaaatgcagacacgccatggtaagaggcaggcagctgcctttttcccataggaacggggggcagacaggaagacgacatcaccaaagggaccctcaaaaataagcctttgggaaacaaatgagccatttgggatgcagacagatatcataagcctgacttgcgccgggtgcagtagctcacacctgtaaccccagcactttgggaggccgaagcaggaggtcggctcgaggccaggagttttgagacaagcctggacaacatagcgagaccctatctccacgaaaacatacaaagttagccaggcttggtggcacccgccgcccatagtcccagctactcaggaggttcaggcaggaggatcccttgagcccaggaggtcgaggcctcaaagagctgtgatcgcaccactgcactccagcctggactatagagtgagaccctgtctctaaaaatagggttaaaatgagcatcgtgagtctggtgtcacagcctccgagaagcctctcccacgcgttgccttcttcaccaactcccagcccccgccaaagccggctgcgtgctcccaggacatcacgacctatgctacgggatctgtaggcacagctgtcggcaggtccctgagagcacagccggcatcgtacgcagctctgaatcccccgcctcaaacacagcgaagacgctgggctgtggggagctgacaagtgattgcttgcatctgtccacctgcaaacaaccgcccacaggtgcaggtgtcccaagcacacttatcagggaaatcagaaaaaaatgctaccttttctggcaaaacaggaaaataaacctattcttaaatcctagagaagatgtttctcttttgcaggaaaaggttctgagctgagactgtttcatggttaaagtaaaaacagtgcttgaaactcacgcccaatgaggaaatctgggacgaaggaagtcaggggctgggtgaagcagagagccactatcaagggacagaggtaacaggggagtctgaatgacatcacactcgataaccctccctccacgactttccttgcgatgtccctctttttctccaatccaaatcccacatctcctccaagaaacgctgccatgacgatgaaaaccaccatgacgctgtgaggtggagtccaccaacgtcctctgcccgaccaaaagcatggaattcctcggagcccactcgagtaagctttgacttcctccctgccagtcatgctggacacagggctcgacaaacacaagagacgatcctcggaccatcctaactcaacgactggagactgaggtggccgctgccagaggcgcggccggaggaaacgtcatggaaataaacaagggcggccacaagcacatggggtccgggaagcggcgggcgccaatcaggggcaggaggagtccaggacctgcctagcgccggccgcgcccgtctcccgagcccccttgtgtcaggcccggtgcccggtactcaacatgcgctcgcactccgccctctagacagccctggcaggacgcgtcctcctagttgacatttcacactcgtgaagacgaaggcttagggacatctagtgctttgcaccgggtcccagggtgggtggttccggtcccgactgggaaaaccgtcgcccgcgaacgtgtggggaggaggctgggccgagaacggggaccccgggcgggaccggggtggggtccagacccgggcaggggagccgagcccaaggcaagcaggcgggcgggcattacctgctgcggggggcgcctctccgccgtcaccgggcgcgccggagccccgggccccgcggtgccggaagtggcagtagggccgccggcagggccccccgggcgccccagaccaataggggcagtcaatggcccggaagaagccagtggagcgtagcatggtccgtcccgcggcggggccccggcccggagccgcccgggccccagggccccctcactggcgccgcggtcgccgccgcccgcgcctcacggaccccgccgccgccatcttgctccgaggcccccggaggccctcgggacgccgccgcaagggaccccgggaggggctgcccgcagcgcgcctgctcagaaacgcctgctcctgcgcgaccaaggctggtgacggacccctgggccgggacagacggccgcgggaggaagtaaggagggcaggggctgccctgcctgcggtctccgggagcctcgccagcgccgccgcccgaccttcggcggctgtagcggcgccatcttgagccccaggcccctgcggcgccagggctgtccacggcgcgcctgaccaaaaaagccccgcggggcccgctattactcatttgcatattatttcctttcgttagcatatcaccttaaggcgccctctgctggacgaggagagttctgcggggaggtggccttaaacctgggccaggtgaaactcatggttgaattactccgttcacagtctttaaaaatcccctcgccctggtatacagctggctctcaagaaacgccttaatctccccaacctcgactcttgtcatcagtctaatgaccaggtccacgttcactcatttgttcaacaaatattgagcgcctactgtataccagctagagggtgcattttaacagacaaacgaggaacaaggctgggatggggcaactctgtagtctggtggagtaggcccacgtcttaatgggaagtttaacctggtgcattttggtgggattgtaaaatagtgccactgctatgtaaaacaaaaaacccaaaaagtttgtttttaagagacagggtcttgctctgtcacccaggctggagagcagtggtgcgatcacggctcactgcagcctcgacttccctggctcaggtgattctcccacctcagcctcccgagtagctaaaaccacaggtgtgcaccatcatgcctggctaattttttgtattttgtgtagagatggaaaaagttaaacagaattaccctatgagcaactctattcctgggtatacacccaaaaagaatagaaagcaaagtcttaggtcgggcacagtggctcatgtctgtaatcccaacactctgggaggctgaggcgggtggatcacttgagcccaggatttcaagaccagcttggccaatatggcaaaaccctgtcctactaaaaatacaaaaattagctgggcgcgatggctcacgcctgtaatcccagctctttgggaggccgaggagggaagatcaaccgaggtcaggagtttgagaccagcctggccaagatggcgaaaccccacctctattaaaaatacaaaaattagctgggcgtggtggcgggcgcctgtagtcccaactacttgggaggctgaagcaggagaatcacttgaacctgggaagcggaggttgcagtgagccaagattgcaccactgcactccagcctgggtgacagagtgacagtccgtctcaaataacaatacaatggttaagatgacaaattttatgttatgtgcatgtgattttaccacaattataaataaatgacaggatgcaatgatgaggggacgtgggttgggatgggtcatgggcgactctgcagaggacctgatctaatctcaaagctgtcctatcatgggcagtggaggcgtagactccctgtcatggctcctgatgatgcgtgagagatgaactctcatttatgcgattgctccatccgtgccggctggtgtcggtcattcattcagcaaatagttactgagcacctactgtgtgccacaaaatgctagaaacatccataagcagagcagagaaccccactctggtggaggtgatggtgtaggcagggaggccgacaatgaacacagcaataagtgagacagcctgaagccaggtggaaagtgctttgagaacagaaacaggagaagagcctggactgggcacagggctggtctgggtgattctatggggaaggcgggatttgtgcggttttacagaaaattaggggccaggcatggtgcctctcgcctgtaatcccagcactttgggaggctgaggcaggcagatcacttgaggtcaggagttcgagaccagcctgactaacatggtgaaaccccatctctactaaaattacaaaaattagctgggtgtggtggcccatgcctgtaatcccagctactcgggaggctgaggcaggagaatcccttgaacctgggaggcggaggttgcagtgagccaagattgcaccactgcactccagcctgggtgacagagtgagacagtgtctcgaaaaaataaaagataaataaataaataaaagatgatgagggagccaagcaggcttctggaggaaaagcattccgggcagagggcacaggccatgggcaggactgcgcctggtgtgttggaggaacagcgaggaggccagtgtggctggaccagggtgaggagggggagagaggcaggagggaagagcagggagaggacggggcaggtcatgcagaaccctatgggcctcagggaggacttgggctttgactgtgagggcagtgggagccatggagggttgcgggcagaggaggaaccagacttgccccaggtgttcacggacaccctctggtggccgtggggaggacaaaccgtgaggagaccagggccaaggtgattgcactggttcaggtgagtcgtgaggaggctagaccgtcgcggtggaagcccttacagcagggaaaggcggccagatcctggatctattttgaaggtagagcccaaggaggtttcagatgggccagatgtgggtggtgagacacacagtggggtccagggtgactccccaaggattttggccttgcaggatggaactgccctcgaccgaggagggggcatggcaagagcagcctgcgggtgggagggacgcccgggagggtcggggtcccaaaggcaccaaaaggatggtgctgcttctgggcacgtgtgtgtgctgggggtggggcgtgtaatttaaaagcctaatgcgagtgtgtccgtcagagagaggggtgaggctgcgagtgtagaccccatattctagacattttgctccagaggggcagaaaaccaggcaggagctggaggggtgcgagagtcccgggagtgatgtttgtggggcgtccggtaggatgggaggatgggtcgggcaggattgggggtgcacgagggaggctgccctcgagtaaagccgggaatttgccgcccaggttggggaggggtctggcgtgagccggcgccggccgcgcgatacgagaggccgaccacccccttccccgggcgggcagcaggcgaagccccagggctcagcaggtgtgtaggagtggcctgcccggccccatcccagccccgccggcctccaggctctggggagcgctggagtccacagtggttttttcctggggagggcctcaaagctctcaccgccccctcttccctattcccactaggggagctggcatacagtaggcgctcaatacaggagcacaggagcctgggaggcggccgggggaccctccgtggaggagcctgtcccgcgccggcgagcagccccgggggcgcaggctcccccatcccctgcggcaccggaaggggcgggcggtggacgcccccgggcgccctgtcactgtgcctcggttgccaggcaacggggcgggcgggaagctgggcggggggcgcagctgcgccaggcgtgggtgacacccggcgggcgcagcgcgcgctgctgcaggcagccccctccgcggggcttagggctaggggcagggcattttgtgtctcagccagaggggcctggccaagacccccttcactagcccgctgcctcggtttccccacgaggtggatgaacttgggaccacactggtgggtgggacagagggattcagagcgtgcccacaggtggggactgccacgggagagaccacacacacgctggagtagggtttaaaaaggggcttgtttaattaattaaatacaaggatgaggccaggcagggcgggggaggggcgccacccacggaaagcacacgcctctcggagccgcctcccctgcaaacggctggaaccaggtcccagtgatcagcgactcctgggagagtggaggggtgggcgcaggtctctccaagcccctggacactggagaggggcccagttatagagttctggaacccacagccctacctacccctgctccagacaggcccctgccagggctggggccaaccaagactcacaaaggaaaacggggccccagtcccccacccacccccacagactaaggcatctcactagcgctgccagaagagggtttgaggctagggacagagaacacagagagccgagggctggatggggcaggaccctccgagcccagctccagaagggcgtcccctgcctccctccccccaggatcccaggcacccatccctggatcctgccaggccggggctgggtccaggtgcacaccagtgccatccaaagcccccctgtccccaagcgagaggcaggacggttctggaacaaaagggggtaccaaaaacctcctgcagccaacagtggggggatccacctttctgggtctgacatggaaccggggacccttctcattccaggctgggggtcctcaataccccccccaagaggaaatgcaacccaggccacagcaggacgaccgctgacaaggacacaaaggtggcccccgaggaacaagtccccaccccacccaagttcagctcagagaccccccacacacactcacaccccctgaggatgccggaccacccatgggggcccagaaaaaaaggaatccgtgcctgaaaaaatattctacccggtgcaaaaaaaacgagctaccccaggaggctgcacagccagccctctgcttccagtccacgaggcaagacctcaaccacgggccaggacccacctcttccaagcacccaggagaaggaggggaggccagggaagcagggccgggccaggctgcagcccaggcccggaagagcctgcaaccccggcgggcatgggctccacggccccacctgcaggccagggagggcagcgcagcccaacagccgcagtcgtcgttaagggagagttgattgtcacgtgataccgcaacggccaaagtcagcaaggcagggactggaggcccaagcccggtgccagcctcccctgcagcctctctcacccacccacccagagagggcgagctagggcccccacacccgaggacagaggaaaataaataagccaggattccctcccgaccccactgagtcaaatgttctttggaagaacccagaggtcccctccctccccatcccaggtctcagaagcaacacctggagcccctccgggcatcctaacgctgccccactcctggctctacccccgaggtctggggggccaggcagcccctaccgtgggcagaacttgtggacacctgagattgagtacccgaatggggggtggctgggctgcacccccatttccctgaactactcccatggctttcggtggggtgggggtggggtggggagaggcaggggccgtgtcaacccccgactcctctatggctgtctgaacacttcatcccaatctgcagggatggggcagggggtgctttccccgggccggctcccagaagtccactccacccccccaaaccccaccccgggaggggggcagcagggggtggtggagaggagaggggaggacctcctagctgccctgggggggccccgttgcacagatgggaagaaagttagtatcatggctatttacagacacaagcccccgtcacccatcctgagagccacctctgaggtcaggcagacccaggtccagtctcaggccccctcctcactctctggaggggggcaggggtgtcttcagggtttgcccacggctggaaggggcccaggctccccgtgggtcctcactacacccctggatggcagaagcatcctggcggtcagggtgggctgcacgagggccctacaggcctgcgggggctgggctgggcgcggggctgggcgcagggctcccggccaggctgcagggcagcgagtcgctgggggaggtactgcgggcaccagggcgccggagcaggtccgggtggaagccggggtggcggcgggcgtgcttggccaggtggtcactgcgggtgaagcgcttggagcacagagggcaggagaagcgcttctcgcccgtgtgcgtccggtggtggcgggccagctcgtcggagcgggcgaacttcttgtcgcagccctgccagtcacaagcaaaagggcgttcccctggacggagagacagagacagacagcgggtcagcgggggcggggggagatgacagacacgttccagcagatcccaaagggtggcgggcatttgtcccgtgccgttttagaggctgagctctggtgtgagttcaaaacatggagaagcacaaagaatacaacccttacccgccccccggtggcccaacacgagaccctaataaataatcctcttatttcctaccagctcttagaaaggactctccggcgagcccagaatctgttaaccgtaagtaaccgccgcagacccccaaggctgaagctccccaggccctcgcagcctctggccccaggcgggaccctggcagggattagcaaaggcctcccagtgtctgtcccaggcacaggcacgctcagaaggcatgctcggccttcaggctgtccctgccccccacccaggggcatgcaggggcctccatctgtgcatgatcccctccttttccaaatgaccacctgggatgcaaaggctgggttaagggggtacaatcatggcaacctccctaaccctcctggcccctccacgagcaagggggcatgggaggaacccgcaggcacagtcagtctgggccccgatctcggggtgtggttagatggaagacaggcaggaaagctcacagggaggggagggggcggggtctcccgggaaggggcggggcccggcgggctggactcgccccacccccacgggacagatggcgctgggcaggggcgggccaccacccggccacttcctccacagtcccctcccaccgccaaggccgggcctcgcccatcctgcccctaaccagccgtcaccatctgggcctgcctgtgcgcctccaggcggtgtgggtctttgctctagaactgtgccacccgaccccttcctttagccggggtctcacgcccacagcatgtggcatcgtgatgtcagcgtctccccagcagataggggtctccaacgactggggaggggcaggtcagtccacctccacccagggaccgaagcaggacaaagggccctgcatccccgaagctcccaccctttcgggccctgcaccaggtaccctggaccctggcattccgggacgttattcccgtgacaccccagggtgggttgtgtggatggagaccggatgtgcatgcccctcgtggcactggttggagccctgagtagcaaaagagacgtcagaaccaactcccctgagtggccccaaagcctattctcaaggaagccacagcagggccaggagggtagtcacccggtgggttacaaactgggcagcccacgcccagcactggaggttgctctggccctgggagcactcccaccggtccatgaagaactgcagccagccaggggcctagaaggacccacagcagggaccatggtgaggggtacagagacggcgggaggggcacggccatgctcagggtgaccgagtgacatctctgctctaagatcaggggctgccctggggagcccagctgaggaggggcacgggagggtggaggggtctgcccactgaggggcaccagcgatcacccgtgacccaagaagagctggaagaaaaaaccttcccttctcatctcatccttcctccctgccacaccccgacaccctcagcaaaacaagactgcagacagagaccagcagcccccctccccaagaggttgtgaatccaggcagctggagagggggagagaccagctgtcaccaagaccaacagtagcctcaaatccctggggctgcctgctccacaccccaagtctcccccaagcaacccaggatgcagctggggtcgcgggtccgccccagctgggggccgtctacaacccaagcaagaggcgcagagcagccctggaagggaccccactcccatctcaaccactgggccctgacagctcccaagggcctcagtctggggacggggtctggctgtgggagcgcggctggagcagaccacgggattggggctcgcgcccctccagggaacatgccgccgtgtcgccatcttgcaaggcacaggcggggaggcggcaggagggaagggggaacatcccacggctgggtgccggacagtcagttggttcacttcccctttcagggcggcggggctggtctccactccctctcccccagttccactttgcaaggaggagcaggttgccggggtggggggggcgaccggggcaggggcgcgcagccgctgggaacacagctgccgcacgtagctcggcggcggcggcggggacatccgcagccccagccggccccgctcacgtggtcccactcccgccggggccagggggcccgggccagggtcgcctctccggcctgggtgcctgccagccccgccccgcgcttggagactgaggcgcgcacatgcgcacgtgggtggcggggcagggggtgcacgggctacccacccacgctgcgctgggcgaagcgcctctgcgaaatgccaggccctgcctcgcacacaatccactcgcagggaggagggtggggtgaacttgtgggggcccagagcgcgctgctcctagccagccgggcccccaggtgcacagccacccagctgctccgcgctacctggccgagacgcagcgccctgaggatgcggtgggtggggacaacgcgggagggcagtgtgggcggggccgcggtggacttgaccctctgactcaggctgggcccgggtgagctcaggacagcctcggaaacaggcaggctcagaaaaatggagtccaggaagtcctggaaacctggcccggccccgtctgagccggcacaggaggggcctggagacaggactgcgggactgtgccaagggccctggttccgacagggaagcctcacctcctgagcttgtctggggggccttggggtggggaggggggctgtggccggctgcctgccggggcactcacgtccacctaacaggtggggtcgggtctgtaggggagggcacaggtggggaagaccagccccagccgcaaagcaagcatcccaggagagccaggaaaggctggggctggggaggcctcttacccacccagggaagggaggagctcctgaaggtgatccttgagcaggttctatagaacctataggcagctgcttctgggagccgctgcagaaaagggggaacactggtggtgaggccctgccagcctgggggtggggtctcgaatactactgggccatagcaacccccacacccactctgcccctagctcccctgacttcccaaagccaaagcttccttcctcccccatccccactcctccagtagacttcccctttccaaaccccctgctgttcccgccaaacacgcaggcaggcatacccacccttgtgtcaatcccgtacctccccacgtgccacctgccagccaaatcccatcaccttcgggatccgtccaggccccaccctgcccctcccagctcactcctggactagtgcagtagtccagcagctcccgcctgggcacccagactgcgcttggctttcctgagttccgccctggcctagggtcaaaactgatggctgatcctgcccggagcttctctgagcagcagtgcccctcacagtggcctggtgccccccaagcacccttggtcagcttctctgtctttgtaccaggcttccaaaaacgcatgcatcttgtgggtgtaatatctgcacccctgcactccagtgggagcagaaggcaggcacttcattgacggctgggtccccggcaatgcccagcacaggcctggtatacagcaggtgcttaatgcatatctgtggaaaaggagaatgcaggcctaggggatcaagctctggttccaacaagagcaagggcagataatgtttgctcagcatcttgaatactcctgtcctccccaccccgccgccaaactatcactactcccttctacataaaaggaggcccacctgaggcccaacccaggccaggacctcctgcaccagactctgggtacctgggggtcggcaggggacaaccccctcaaggaccctggtgcctgtgtaacctctgttccagaaatggtctaagccagggtggtgccccccgcccccacagctcaccctgctggtatcatgtgcctcctccccaccgatctgggctgcttttatcagagagcctgggtgggggtggttatcgccccccacaaccctgggggagccctccccatcccactagctggggcacctgcaggcagttccagctgctctctgcactctgcaggctggagaggcggtgggtgggggagggcagtccctggccccctaccccccaccccctatggcctggcactgccccactccgaccctccccagataagctgccagttctcccaagctctgcccaccagcactgccatcccaaccctacaggagcgcatagttctgcctgggggtggaggagagaatgaagtggggcatggctgcttccccctctgggcctcagtttccccacccacctgtcctcctggggccctcttcagcaagggatcagaaacctggcaggcactcagacactcctctgcacacctcgtcctgaggagtctccctccaacccagtgcgtagaccagcacgcctcgatccctcccacatctcgtcctgccctcctcaacccctctctgatcctaatcccttctccataaatggatttgcctctgcaaagcccagcctgcctcactgccgcccccagcgtccccaccctcgggattaagtgcagggattcaccttgccgaggtgccccctccccacctcaagtccctacctccacagcagaccccagagccagcacgcccttcctctcccattccctgccccacccagcccagtgggcctcaggctgcctcctccaggaagcgctttccgtcatcactagcatccctgttgccaccccccaccccgccccccgccaccacggacacagttccctaagtcctggggcgcggggactgggatgctgggtgctggcctgcggcaggggacttcagagtgggatacaactgggggtgaccctgcagccccctggggggcacctgacaaggtctggggacatttgtgattgtcacgactggggagggggtgctcctgccatggagtgcgtagaggctggggacactgcataaccccctgcagtgcccaggacagcccctccccagaaaacgatcaggccccaaatgtctcggtaagtgcggaggagagaagccctgggtgagaagaacccttccaggtctgagcccctctcctggggagggtgtcggcaaaccctctggaggtgcaggctgacggtgtgccgggcactggcatgccgggggcggggggggggccctccggggatgcagggggtttggagagcagggagccgacagccagcctctcctcccgcccccgccccaactcgctggctcgctcactctccgtaaccatagcaacggcgtcaacatcacccacagcttccaaagtccttccccgccccacgcaggggagagagagccgagagctggccgggctaggataggggctgtgggccagacccaggggacgggaggtgcagtcctgccgcctgctgcccccatgaagaacatcccactgctcccctggcctccctgctcccagggccaaatgtggccgaaatcacaggtggggctcctccagtgtgcctcagttggtttatctgtaaaaatggggccaggccacgactggtgttccctttacagagaagcactccaggcaggggtgggtgggggtggaactcgttctcaatggcccccgggacagccctgcagccaccggtgactcgggttcgtctgcggatctttcccggcctccactccattcagggacagccctgcaatggggctccctcccaaaaaaacgcatggccttcctgtcccccaaaaccagcttaacggcagccattccctccctcctccgggggctgaaaaaccagaccaccttccactaaaagaggccgtttacacagaccccttggtggtcctgggggctggggaggcccggaagaggagcctggaaagccacaagtatccaaaaccctttggaaaccgaatccaaggtgcctgggcctgggactgccctcccagtccccaaatcgttactgtaaagggggctttggaatgggacgtcagcaggctcaaggggtgggggagggtgccaggagatccgccctgccctcccccaccacacagggtagacggtggcgcgccatcagcacaactgcatccacccctggggatgcccgactgggcacccccaggcctgtttcttactgcaatcccgggataacaatactgccttcccaggactccaaacccatccctcccctccctgctggcttagggaccgctgccccaatacccgggggcctatggaagcgcctcttgggtgccactcagggaggtggccatcccgtccacttaacccagaaactcagaaaacccaaatggagctctcaggccacgccatctggcaagaaaagaatgacctgggtagacaggtgggagtcgctttcccaacaggctcccacttcagccccgtctgttcagatcgcccaacttacccccaaaaagccagggcactcctggacccctgcccaccgcccggagaggcacctccctttctgttcccaacgctgcctcgccatcttcacagacccccaatgtccctccccgcggagatacacggaccccattgccctcaaaaagaggtaacaccctgggacccctccgccgaggatgtgtggctcctcgcagaaaacgcagaccccacccaagtcctgtcttgacgccctcggttcccgtctgtgtctcaaggtgggcagagcctccaggcccctgggaccaggacagggactgagcgaggggtgaaaagagtgcagaacagagagggggcggccggcaggctacacaccaccgcccccacccgccctcctgctctccaccctcaggcgtcccagcgcggctccccataccccaaagatggaccctcaattcttccgcaaggcattcgcggcccctgctcatctcagccccaccactctggacggcccacttcccttcggctgctccacgtgtccctacaatccgagcccacggaccaagcctccttggagtgtccagctgcccaaagcggccaccgctatggctatgaaatagaggcagcatcgcactcttgatagaaatgagaaaattgagacccagatcgggtagaggtcttctgtttggtggcaaggccagaatgccaagcccaagggcagccgcacagctttcccccagccccccaccctccccggaagggacaagcacctctaatgcccaaaccagggccggccatcaaggcccaccgtcccctgttgcccagtccaaactcccagtccagaaagtggaaccctaggaggggacggagtgaaaaaatacagccaggcccaccaggctcccggttcccctcgccgccccggggactgcgctaggaggggcgttggtgtagccgaagcgctccaactacgcgcaccttcccgaatcgcccgccaggtaggggtgaacaaacacgccagggaaatacagcagtgtggacccgagcccctcgagggtcctccaatactatgaagttcccccgcccagactcaggccccaacccgcgctcctagcctcgccctccccctcgttaaaatacagagaacgcagagaaaacgtgccgggctccccccatcctggccccacgccaggtgctctgccgacctctggggagaatccgcgcggccaccccggcggcggcgacgcggttcctcctccattttcacagataaggaaactgaggctgggggagggggagaacccagaaccccagagccggatgctccaaccacggtgcccaccgcccagaccagaacgcaaaagaaaaaaaaaaaaacggaacaaggcccagaaagggagagaggtggtctgcccaggagtctcaatcccgcccgcagacctcgctgggcccccggagcccccgccactgccgccggggcggccatccgctcgccgcccgaccgcgtggccgccacgccccccgcgcgcgccccacccaccgaggccccgccctgccggccggcgcggcggcggcccgggcgcgcccccctccccgccccccacgcgccacgcagtttcggggtcctggcgggggaggggtctcaggcggccgcccccgcaagggccgggatcgcggctgcactcacctgtgtgcgtccgcaggtgcgactttaggtgcgaggacttgtagtaggctttggcgcagtccgggaagggacagcggtggctcttggcggcggcggagggcgcggcgccgggggcgcggcccgaggacggggacgaggcggctgaggaggaggaggcgggcgaggcgccccccggggcggctccgggtccgccgcgcaggtcggccaggatgctggcggccagcaggtggggcgccgcggcggcgccggggcccgggccagaagcggcggggggcggcgggggtggccccggggtcccgggtgaggcggcctcgcggcgcgccgcgcgcacatccaggccggcggcggggcccgcgccctcggggccgggccgcccgcggtgcaccacggcgcccgaagagatggccatgagcacgtcggcggcgaagtaatccacgcacgccacggccgccgacatgccgagcaagggcgcgcggcgcggcgggcggagcggaggcggcgggagcggcgtccgtccggccggcggcggctgctcgagtgcgggaggcggaggaggaggaggaggaggcccggcgcgcgccgccgccgacgcccgcgctcggcctgccccgccccgcctgacgcgtcctgacgcaccggagcccgcgggggcggccacagcccgccccgcccggaggacgccccctcggggcgccgcagccacgccccccgcccggcgcgccctccaccactctccgagccgcgcgcggccgccgggggcggggctcgggccggaggaacccgccccccggcgcgcccactccggcctccgccagcgcctagcgtcttaggcccggagcgcgccttctccgcgctagggtgcaaggccgggagccccgccccctcccggcgcgccccactccagcgcgcgcccccgtaccctttcccggagcaccaccccctcaagccggggcgggaggccgaggaccccgccccctctccggcacgcccctccttccgagagcgcgccccgccccatcccggcacgcccctccctcccagagcgcgccccgcctcctcgctggcgcgcccaccccacgccggggcgcgcggccggcgggagcccgccccctccccggatgcttccctcctggccccgggcgcgcccccgttcgcgatggaggagggctccgatccccacgtggccggggttggaggggtgcggaagcggccggccccgcccccaggccacgtgcgcgacccttcccccctcttctcccggcctggggccctgctttgaccccgcactcaggcatctgctcgtcctcttctctggggttccccctcgccgctcacagagcccctcggagcctcccggccgagacacccggtatcccgcgcccgcggcggggcccgggagggtggggcaaggctgcgttcgttcctctttttgcacccagttccggagctactagagcgcgccccactgggggtggggagggccggttgggtcccagagggtcgggatagggggacgggaagagggggccgaacgcaaagggctgggctgggctgggggcgcctgagcgggtcagaggttccccgccctgctgggacaccggggtccggggcttctctttccattcccaggcatcgattcttggggttcggacgggaaaactgaggccaggtattcgggcctcccggccgcgaggacgtccaggccaacttgttaaatattaggggggacaccagggacgcggatggcccagttcgcaggcccaaggcggcgggggcacagaaactgggcggcccccctcggtcgcgaccgcgctcccgccccttcccagctccggcggggcggcggggactgcgcagtggccggagctgcctccagggggcggagctgctttggcctgcggcgacctcctgctctgggttgggcatggacagaggccctgacccgattcggggcttctctagccccatcccccgcccacctgcaaccccagctgacgccctgaggctgaccactgttccctgggtcgcccgcactgcgcctgggctcaaccatgcttggttaagccagctgagccctccctgggccccagtaagcccactctacgtggctggacagagcggagccgagagagaggaggttcagcgaagtgtgggagggtacagggtgccctgcacacacttgcccctctcctaggcctgggctccagagccctctctgcacccctaccattcggtgggcgctgggggtcggcgttcctgctcctgctgggcctctgttgtctttgaacttctaggacgatgggccacttgggcaggtcccccaggtccccaccatcccagcagcccccagggtcctggaaccccgcattggcttgtggacaggtgtgtcttgaggcctcagggtccacacccaaccatgcgtcttccactgatgtttcctgggcttagagcagaaccaaccagccctgccctcaaggggcttacagttgtaactgggaggctaacgatggggggcaggggtgagcagcctccaggggtgggccacatggccccaggcaggaccttcactgtgagactccattgtctgcccactccagccattatcagggtttcaagtgagtggcctcatctgcaggtcatgccagccactccacaggcaggagaccccaggtgagggcacacagcccacaccccacccatgaggcttctattcacacccctaagccccaggaacactcaggcaacccatgacccctgcggtgaacacagacaaacctccagcagcgcccggcacagggctctgtcctctcttccttactctctatgaccctgtaaattctccaccgggtgcggtggctcacgcctggaatgccagcactttgagagaccagggtaggaggatcacttgaagctatcagttcaagaccagccggggcaacgtaatgaaacccccaactctccacattaaaaaatgagctgcaggccgggtgcagtggctcacgcctgtaatcccagcactttgggaggccaaggctggcagatcacctgaggtcaggagttcgagactagcctggccaatgtggtgaaatcccgtctctactaaaaatacaagaaaaaattagccgggccaggtggtgggcacctgtaatcccagctactcagaaggctgaggcaggagaatcgcttgaatctgggaggtggaggttgcagtgagttgagatcgaacattgtacttcaacctgggcgacaagagcaaaaactccatctcaaaaaaaaaaattagctggaggccagtcatggtggctcacgcctgtaatcccagcactttgggaggccgaggcaggcggatgacctgaggtcgagagttcgagaccagcctgaccaatatgaagaaaccccgtctctactaaaaatacaaaaaaaattagccgggcctggtggcgcatgcctgtaatcccagctactcaggaggctggggtaggagaatcgcttgaacccaggaggcggaggttgcagtgagccgagatcgtgccactgcactccagcctgggtgacaagagagaaactgtctcaaaaaaaaaaaaaattagcgggcgcagtggcctcacacctgtagtcccagctactcaggaggctaaggtggaagggtcgcttgagcccaggaggtcaaggctgcagtgagctgtgactgcaccactgcactccagcctgggtgacagagtgggaccctgtctcaaaaaaaaaaaaaaaaaaaggagttgtcattcccattctacagatgaaaaaatcaagactgggagaggaccgagaacagccggctcctgctcacagctaagaggcagcagacactttggggcatccataactcagccccttctttcttcaaacctgttcctcacctataaatgggggctcacctctacccttccctgacagcgcccaagaggatcagggggacagctcctcccagccccaaagatggacctcccaagcctgagggctatggagcaaagctcagcaggggacagacagcacccaggtgttgctgggagtgggtctctagcagggcaggaagaacacaacgggactctcagaggggccacggagccaggaactggggccttgcctcatagagggcaaagaacacagtctcccagaggacagatgagggcagaggtcacataaccgggggtgcacccacaacatggataccccaaggtaggtgagggccaaaaacaaggctgcagggccgggtgcagtgactcacgcctgtaaccccaacactttagggggctgagatgggaggactgcttgagcccaggagttcaagaccagcctgggcaatatagtgagacccctgtctgcataaaaaacaaattcaaaacttacccaggcatggtagtgcacgcctgtggtcccagctcttcgggaggccgaggcgggaggattgcttgcggccccgaggtcaaggctgcagagagctgtgatacaccccagcctgggcaacagagcgagatcctgtctctaaaaatagtgatagattgtctgggtgtggtggctgatgcctgtaatctcagcactttgggaggccaaggcagatgtatcacctgaggtcaggagttcaagaacagcctggtcgacatgatgaaaccctgtctctacgaacagtacaaaaattagccaggtgtggtggggggccgcctgtaatcccagctactcgggaggctgaggcaggagaattgcttgaactggagaggtggaggttacagtgagccaagattgtactactgcactccagcctgagtgacagtgagactccctctcaaataaataaaaacaatagtaaataacaaagatgcagcagaagagggggtaatatgtaaggacgtgtgtgtgtgtgtgtgtgtgtgtgtgtgtgtgtgcgtgcgcgcatgcactggaactgccatatcttcttgatttaagacagtcgggtctttgctttgtgatagttttaatagtacttttctgtagtactcaaacatttttttttaccatgtgtatttactacatgcctctgaatgtcaacaggcatctaagcaatgcaatgatgggccatttgtcctttcatttttaggcttttctgtatgaaaattcatcttctaaataaaactccccccaccccctgcccagtgtgggctggactgagggactcgctgccgcagaacagggcagggacaggagacgatggcaatgggccccgggacatccagtgaccccacctgcaccagggggccgaggtcaacatcaggggtgaagtcgtcagggtctcggcgacccctgctaggatgtgaggagaaaggggcctccaggagggtgtcctgccccaaaccctgtcacctcagtgtgacctcaggaagacaggcaaacccagattagggctttttttttttttttttttttttttttttttttttttgagacagagtctcactgttacccaggctggagtgcagtgacacgatctcggctcactgcagcctctgcctcccaggtttcagcgattctcctgcctcagcctcctaggtagctgggattacaggtgcccaccaccacaccgggcttttttttttttttttttggaaatagagtttcgctcttgttgtccaggctgcagtgcaatggcacaatctcggctcattgcaaactccctcctgggttcaagcaattctccagccttggcttcccgagtagccgcgattacaggcatataccaccatgcccagataatttttgtacttttactagaaacagggtttcatcatgttgaccgggctggtcttgaacccctgacctcaggtgatccacccacctcagcctcccaaagtgctaggattataggcgtgagccaccgcacccggccgatgaggggacgttttacagaacacttgagcaggcctcctcaagactgtcaaagtcattaaagacaaggaaagcctgaagaaccaagatagacttttaagagactcaagagacataaggatgaaatgccatgtgggaccctggatgggggccgggccaggaaaggaaaagactttgggggaaaacaggaagctggaacagagagcccggggtttcactgtcagagctgtacccatgttaatctcctggctttagccaggcatgatgactcacgcccgtaatcccagcacttccagaggccgagacaggtggatcacttcaggtcagaagttcgaaaccagcctggccaacatggtgaaaccccatctctactaaaaacacaaaaaaaattagccaggtttggtggtgggcgcctgtaatcccagctactcaggaggctgaggcaggaaaatcacttgatcccaggaggcggaggttgcagtgaaccaagatcacaccactgcactccagcctgtgtgaaagagtgaaactccagctcaataaaaaaagaaaatgttctggttttgacggggtgttaccacaagggaagccagtgaagggttgatgggattctctgcaccacccgtgcagctcttctgtagacctcaaactattccaaaataaaaaatgttttattattgtctttaagatgagatttcactgttgcccaggctggagtgcagtggagcaatcatagcttactgcagcctctacctcctgggctccagtgatcctcacacctcagcttcccaagtaactggaaccacaggtgcacaccgccacgcccggctaaattttttaaatttcattttctagagatagggtcttacttttgctgtccaggctgatctccaacttctgggctcaaacaatcctcctgctttggcctcccaaagtgctaggactacaggcgtgagccaccacacccaacccaagataaatactttttctttttttttttttttttttttgagacggagtctccctctgtcgccaggctggagtacagtggtgcaatctcggctcactgcaacctctgactctctggttcaagtgattctcctgcctcagcctcctgagtagctgggattacaggcacgtgccaccaaacccggctaattttgtatttttagtagagacggggtttctccacattggccaggctggtctcgaactgctgacctcatgatctgcccgcctcggcctcccaaagtgctgggattacaggcgtgagccaccacacccggccaaaacttactttttaaacaaatatgaaaagtggatgtgggggtgactggactgaataataataatgacaatggcagcacggcagcagctcacatttgcagcactgcttggagttgctttaaagtccactcctagaaaggcacccaggaaatactcctaagggccagggatggtggctcatgactgtaatcccagcactttggaaggccaaggcgggagaatcgcttaaggccaggagttcgagaccagcctgggcaacaaagcaagactgcatttctacacaaaatacaattagccaagtgtggtgacgtgtgcctgtcgtcccaggtaattgggaggctgaggtggaaagatcactcgagcctaggactgggaggttggggctgcagggagccatgatcacaccactacactccagcccaggtaacagggtgacagtctgacccaaaaaaaaagaaagaaaaaaagaaagattcctgattcctggcctggcgtggtggctcacgcctttaatcccagcactttgggaggcagaggcgggcaggtcacctgaggtcaggagtttcagaccagcttggccaacatggtgaaaccccgtctctactaaaaatacaaaaattaaccaggcgtggtggcacgcgcccgtaatcccagctactcgggaggctgaggcaggagaatcacttgaacccaggaggtggagattgctgtaagccaagattgcgccactgcactccggcctgggccacagagtgagactctgtctcaaaaaaaagaaaaaagaaagatccgtaaggaaagagtgcacagggttgtgcactgtactgctggtaacagaaaaaacagggaatggaccccagtatcagcggcggggtcacagagaccctgaggctgctggagaatcaggcagaaccgtcagtcctgctgcagagcctcacagatggggtggcaaaagcaagcttcacagtaaagcctgtgccccagacatggcctcaattctccgtgtgttgtcacctgtacccacaggctgtttattcacggatgacctttgccaacctgtggaagccacctccggacaggcctgcagggacccagggccgtagcaggagggactggacgggctgcggaggtggccatgaggcctgcagaggacgcactcagcggtctgtgccacccatttgagtatctgacggtgtgaccctgacctctcccggtgatcctgattgtcaacaaaaccctaaagtccccacccccccggggctggcgctcctgcaggacactgtggtctggtgatagcctttatttacattactgcaggtgttgcattatgtgaccaaaacgccgacccccaaagccactcagggtatatttctgtgttaaggcgttaaatcacttaccatggtccagtccaggggggccaccacgcacggtggggggcgggggggcagctgcaagctcctgggggacagaggacaaggttccaccagccaggtgggaaggtggggcagcagctgccaccctccaaccggaggacacagcgaggtcaccctgctggccgactgcaaggaagcccctgcgtggggtcctgcagggagcatctctggggtccacggcatccatgctaggagctgcttcagggacaccaaggcctcctccatcctgcacagggtgggcagcaggggcaggatccggctggcatttcctttcccgtgcgaatcccccaacccctgcacccccagcccctcctcagcaggactgcagggccagggccggggattttatctgcacagagtcgggaggggaccaggacccccaggcaccccgcttccttggcctcccaaagatgatgaaaagcttccataagagctttcccccttgaacagggtcagacaggtggcggtggtttttcgttgtttttttaagatggagtcttgctgtgttgcccaggctggagtgcagtggtgcaatcttggctcactgcaacctccgccccctgggttcaagcgattctcctgcctcagcctcccgagtagctgggactacaggcgcccgccaccatgccagctaatttttgtacttttttagtagagacagggtttcaccatgttggtcaggctggtctcgacctcctgacctcaggtcatccaccgcctcggcctcccagagtgctggcattacaggcgtgagccaccgcgcccagcctagtggtggggtttcagggcactctgctaacagccacaggcttcattcacataaagcaccccgcctgggcctgttccctccgtgaggctattggggagggcgggtcccagagtcgcgctcttatcctccacggacacacacactgcctgttctgagctccacttccggctgggtgctggggagagaataggctctggtctggcgggaggtgctcgctgtctggccgggcagatgtgtgtcccgggaccttatttctgagccacctgtgctgtcgtggctgggagacgccgagtgccgagggagcgcgggcctggccggggtctcggctacttctctcggtggggaagcagggacagtcaccccagcagcccagaatcgttgtgaagatcgacgtggcccgtggccggagcccggaaccgggagggaagtgggaccaggggcttgtgctggcccctgggccgctctgataccagttgggcgcccactggatggactcccagttaacaaggcggccctgcactcccaccttgatcctgacacccggactcagaggtggacaggcaggtgcctgccataggggaggaaagaggaggcgcctgctcccagaggccccacctcaggtcacggccaccacaggccaagaggacagaatcacagccaagcagggatggtctccatcctcttccagaaccccagagggccctcaggtcatgcagaacagagccagccgggtgggtcccaccagcttggcattaatgggacgacggatgaatgcagccacagcgtcataagagcttggtcagccgcccacacacacatgctgggaccccacgaatgccagtcggggctgacaggccactggtcccctggggagcagctggagggtgcacagccctgggcaccgccccagacctgacccactggaagggcctagcccacatctcaggcaagcctctgccacacccacagccatgctccagccactggccctggggagggtctgccctccccccgggctccgggtaccagagtgggcctaggccatagggtcacctggctggtgtctgtcccgtcacccagggccccgtgctggggtgtaccaggagcaggtgacacagggtggaccagagactcagcccccaggcgccctacccgggagaacgctgttgcagggcttgaacaagtgtgtcctggaaaatccacaaaatggagaacgggaagttggccctactcccaggtggcctggccccgggccataccaagtgggaggtggggagagcgcgcgtcctggaatagagtgctggcctcccctgtcgccacccctgcggggtcctcccgggtcccaagagcagggggtggtggggagaggccgagggtggaagttggcctgacagcctggagcctgaaggcccggactcggtttaccccatgtgagagggacaggcagagggaacacagtgtacgctgaaggcgtctgggagccctgccgaagcctcggtgctgagttcgcagcagcttgagaatggggctgcctgaaaccaaggccagcatcgcgcaccgtgaatatccacagcccgcagggagggaggggcggccccaaatacttcgatttccaaaatcctcttcatcacagtgtcttgtggaactagtaccacatggatcagatgaagtcgtcaactattttaagatgagaattttatctcagtttgatctgtaaatctaagaatctaagcaatctcaatgttttcaaagaagatcacggtgggagaaccagataaacttgcctgctgttcaggagaaaaaagaaacgtgcaaaataatgcaaggaggaggggcctccggacatgaggtcaggaagacaatggggttctggaaaactgggataagagtctagggacagacccaaatctacttgccataaagacagcacttcagtggggaaaagaatgcttttttgggaaataaagttgggacaatttgtggaaaaaaagttttgcttcctaccttactccttaccaggaatactttctaaaattagacataagcatttaaatatatggggaaaaaaaaaccccactacatttctagaagaaaatctcaaatgttttatgatcttacagcggagaagatattcctgagatgacacaaaaatgcaggagccgtaaagagaaaaaaactaatgaccagtaacaattttagatgcttagcttaaagaaaaaaatacaaacaaagtcaaagactaatgacagatagaaaaaagaaacacttccgggtcagccgagaaatggtattcagcaataaatgtgtcagagtcccaaaaaaaaaaaaaaaaaaaaaaaaaaaaaaacacttctactagacagaaagcgaattttcttaatctgtaaagtgcacctagaaaccaccaccatccacccaacagaaaaatgagccaagaagataaaatacaaatggcttttaaatagtcaaacgtttataataaacatattttccaatctcgaaacgactgtcagtggtaacaatgatcaacgtaacatagatgtaacaggaacatcacgacgttcgactatacttacaggaaacacaagctacagtgaaatactatctcacgcctaccaggtctgcaaaatccagcttgggcaagggtgtcgccggccccctcttatgctggtgggggagggcgatttggtaccacccctttaggggcctaaatacagccctcgcacttctgcaccaaggaatttaacctaagaaaatagtccgacttgggcaaaaaacggtttgtacaagcaatagtcaagctagcattgttcgttataaaagacagcaaaaaccctaaatttctacaggaaaggggataaagtctggtgctataaaactccgtttccggaggaatcccacctgtatctgaatgcatggggcgctctccgagctacgttaagtataagagccccaagtaaagtaactgaccttttgcagaaacgcacgtagatgttcctgcatagactttctttgcagacccgtaagaaacgggtttccctctgccccaggggagaactgggccttggaggttaggactgggaaaaacacatcaagtcttcaccaaataccctttcaggctccttgaattttctactctgtgcacctgaacacacttttgttctcttgcaagcagttgctttgcactggaggcaatgaagacacggcggagtcccagctcgcagggagctcaggttctgacggcgtcagaggacaacacgctctggaccagcgcagcgcccaagggtcagcggcagcagcgagcagggggcacgggatgcggggaggctcttcgggaggcatgaaaggcagacgtgttccgaaacgtgagccgcgctgaggggcacggcgcacgaccggggacagaaggaagacactgcggtcgcaaagccctggccgtgcaaaggccccgtggtcagccaggagcccaggcgtcccctgctctagcgaggtttccttccgaacgtcccgtagcaccgcttaccatggaacggcgggcgctgcctcgcagccccgaccccgcggcggcccccacgggcctacgaggaactcgaggccgagggaaggagtgagagcggccggaaaggggcagggccgagccggaccggtacctggctgggtcccagcggccgccacttaccaccgaggccgcctcttcgtccacagcctgacgccagccaccgccgccgccgtctccactgccgcacgcacgccgccacttccgcttccgtccgtgctgcggccccgcacgtgacgcagcgccttctcgcgcccagactgaagcaccgcccccccttaaaggggccgcggactagagctagctggatgcagcttgggatcccggcctcgccaccgcctggtcgcgcgacacaggctgaaccctgcccaaccctaaggtggacaacaggccaccggttcccgagtcctcccggtcctaagccttctgccctagagatcgtaggaactcttctcgtgatcccagctccagtgtcggctccctcttccaggggagaccctcggggcccaagcacctgccaccgccctctgctggaccccagcttcgccatctacgaaggaagcggcctgtccgagctctgaggtccgtcaagcgcggcacctcaggacccagagtgcgctgtcctggcccctctgcagtaggactgacgggaagctgtcgagggggcagtcccgcgatggcagcagggcccccacgcctggcgtcctcatcgcgcccacccagcagggctcaccagcctccctaggaagcaggcaggggtcctgggctcaaacgctgccccacccatcatcgcccaggcaaccagctccctaagggctccccggactagacagagacccaccccacttccgcagagtaaaacctataagggggtccgtgccgatctctcctagggactcagggacgaaacctgggaaccccggccccctttcgagctcgctgagcgctcgagagagtgagcagagccatgaaaggaaggagagcagccctaaaattttaaatctttaatttccgttttcacgtattttcttcttgcttccaaaaggaaaggagtgcgtagctctgttgcctgtacatcgtccacagcccctgggtcggggcggggtcccctgggccgcccggggggtccacatgcagcccctgggtgggggccggcgcggggtgaggtccgggggccgccttattgctgaggtccggccggttggggccgccgctaggcgcgctggctgggcagctcctgggagatgaagcgacgcaggcgctccaggtactggctgtagagctcgatgtcgttgtgcccggcgccctccacccacagcggctccaccgccttggggcagcgctcgtagagcgccagcccgtgcgagaagtcgatcacctcgtcctccgtgccgtggatgatgagcacgggagacgtgatcttggacaccttctcgatgctgcgggagggtcgtggagccggtgagacttcgcgcccggcccgggccccgccccgcccccgtccccgcccgggccgctcacttagggaaggcgtcgaagcagtaggtcttcttggtgtcggggaaggcgacgcgcatgcccgaggtgagcggcgagtgcagcaccaccgcggcacactcgtagcgcgaggccaggtccacggtgggcaccgtgccgatgctctgcccgtacaggatgatgctgtccgggctgatgccgtacctggcggcgccggagcagggtcagccgcggcctccgacgcgcgcgcacccttcccaccagcgggcgtccccgggcccagctccggatgcgaccctccagtctccccactcagccaagtcagtgggtcaggctcaggctccacaccagtcccgagggccacccccagcccccaacaccgtggcggtgggcgaagccagcggccccgccccgttccctgcgctgccgttcactggcgtttcctagctaggatctgcagggatcctgcctacggagtgcccctggggcgggggtaagggaggccctggcgcctctcctcctcctggtcacccctaggtgcacactgggaactgtgtggcccccacatcctgaatgcttcacaccttcctgccagggttagaaaaccgttcctggtgcactggccaggacagcggacactattcctccctgcagcccttgcccacccccttggccatgaggaattcaggcagctgtgtccccaaatgtctccacccaattttggactctcggagtccccacgcccaatgagatgccagtgcaacccaggtcagcatcgagggtggtggctgcggaggtggcaccccctcccaccagcaccttcccttgggagtggacaagtcctcggccacctcagcaccaccagctcccacccaggggcaccctcacccccaggtcattggtgtgcggcccctgacccagctgatccagcaccagttacaaggcctcctcgtgcccagtcccaagcacacgggacccacctgccaccctgcccatgccgggaccccacaactctcctcccacacgctctaggctctgatcccaggcagacgccctcttgcaaggcaggagcatgggcaggtgtgcgtcccctctgcctggcatctccaccagcagggctgtccccgtccctggcctggaatcccagcctcctggcagcactccacagctcgccactcacccatgccccaaaggatgctgcctggctggtgcctgtggctccagctctgcctcggcctccctggcctgctccctggcagccatggtcagtagtgtgctgagccagcccagccctgccacctgctacaggcaggagccccgagctgccacctggatgtcaccactcaaacgaacaggacacatccccggtggaggccctgggcacgctctggcctccccctcacagctctgggcctaggttcctgcaggacaaagtggcagcaggacagatggccgagcagacagagctcagagctggccatggcaggtgtgactctgccagtggcccaggcagtagagacaggaggggccgaggaagtcgcatgaagtggtgattggtgtcagcgtcccacactgctgggaggcccccagagccagggtggtgccaggggaccagctcccaggcccactgcagggactgcctgcatatcaccaaggcaacgacgaccccacctccctagggcctctgacttctcagagctgtgcctggtccctgtgggagcaggtcagaccagtgggctgggcagggccaggacgagacaggcccagtggatggtgagcaggaaaagccaccagaggcccacccgggtctcctcgtccaaagcagcactggcccgggcggtgctcaaacaccggtgaagggcccaggcaagcgcagggctggggacgtggatgactaggagggctggatctggaatcgaggctggcccagacctcggatgtgtgctgcgggtctgcaccttaccctgtaggccctgccccaggatggccaagctccgcagccacagggcctcatgggccagtcctccggacctggatgcagcagcctcgcctcacttggccccaagtgctgcctcggccgatgggctcccagccacacgtgcacagacccccagaccaccacccactccctcccgccgggtggcatccacacccctgtgacaagctcagccccttcccatcctcaggccaggggttcccagggaacctggctccacaggccagggtgtgggaggaccgcctggccacacctcagccatgtggaggcggcacctgcacacccaagctcgcctgtccggctctctggccctgtgcatccactgtggctcccctcctgcagggccgcccaccttcctcccagggaagcccgccccccggccccccgcctggtcccctcttgggtgtgcccaggctgagctgcccccagggtcgccctcacctggtgcgcagggcctgccaggcggcgtcgatgtcggcatagaggttcctctcggaaggcctgcccgagctggcaccgtagccggagtagtcgtaggagaagatgttgcagtggaggcgggagcccaggccaatgtagaagctgctcatctggcccaggtccacggcattgccgtgcgagaagaggaccgtgtacctgggacaggccgagaagggccgttcacatcctcgctcccagcgcccagctgcagggcaggaggatgcgtagtgacagcccaccccggtggccagccatgcccagtgcctcatttactcccctcccaagggggccagaagccagtgaatggagaggggaggctacgacagcacagctccatctccgagggttccccatggggagaggacaggacagctggcagggggacaggcagcctgggctgcagaggccagccagggagcctcaggattcccatctgtgaagcgggacactgggaccatcggtcgcatcctctctcagggcagactcgcagtgtgtgctcagatactgcaggcttcactgcccttcctcctggaagaacctggacccccggggatggagcgcacaggcccacctttcaggaccttcccaggggagcccatgctgctgctggcagggctatctcccctcacctcacagaatggtgccctcactgttggggcacaactggaccccacccctgcccccaacaagcaaatgcggccaatctctgctcacactcatgcagcccctcctggcccaccaccctgcccaagccccaaggctgtgctgcaaggcctgtctgcttcccagcacgggagctgccccaggtggtgccaggagcaggtggccaggctggccctgccatggactgcttcctccagttcccccaggcccccacctagcccagccagaaggtaaaggctcgccctctggactcagatctggtcagaaccccacctggcgagaaggtggatgtacccgcaggccagggcagcccctgtgccccagctcttgcccagcaggcaaccaccaggcgctgggttgttggagtcgcccagcctgcccacccatgccagctggggatggcctccctgagcctggtgtccttgtctgcgagagaaaattgccagagggacgaggccggcctgacgggggataccacccttgctggctggatggcccttcacggcaggctcgggccctcgggggcaccaccaaccacaccaagcaccgcaggcagaaacgggagccccaagaacagggtgacccagcccaggcgcggccacagctgctcacctggcaccaggcacgcagcgaacatacatgcaggagacgcggttgccgcgggcgctcttggtggggaagacctcgatggtgtccagctcgcgctggctgtactggaagtcggcacgctccgtcaggtgcagcttccagcgcccgggtgcgcccgaggaggctctcagggtccccaagggggcggccccggccccaccaggccccggctcgggctcaggcaccagggagtaggtggcctccggcggcaggaaggcgagcttggcagcgatgcggccggggcagggcgggcagcagaagaggcagcagagctcactcagcgacagcccattcatggcgggcgccgcccaggccgggcctccaccggggcccccgccaacaacgccgcccggcctggcccggcaggggaggggtgggggtgctccgagtcgcgggcaggggggagagcgcccccccagctaccgccccagacagcagccccgttaggaggccagggcccagccccatcgcggtccaagccgagccccagggagcctcgcaaccacaggtctccatgtcgtgccgtgggaagccctgcgggggaacagtgacatgtggggtcctttgggggtgccacagtccagctgggcacccccgggaggcggggcatccacccgtgccagggggcggcatgggcccggggcctgtcagtccccatcccctcggccctccccacggcctgtcaggcactgcaccctacagctcaggggaccccaattcagccccctctccacaggatgaaggaacccccaccttccctgagctggcgatcaccacctcttgccatgtgagtacagccatggcatgcggggcatgcaggggatatgaccccagccccgcccacacccccgaaacgcccggctccagcaccagggaaaccccatgcgccaggactcggtccgcactgctgcccactccctcccccggcccatctctgccaccctatgggtgacgggccgctgaggcaaggacagagctcgaactgaagggacccacgagggacccgaacaggccccgctacgtgagcgtgcacaggcgccgggtcccaccggcctgcgatgtctggagacagaggaaatacaacaaacaaaggctctagaaacaaaggcaggatacatcccaggctcctagggcccccagagcagcaacaatggctcttctctgtgctggagccaggcctgctgaggggcaggggaggtgggctggcgtcagggggtccttctccacccctgacttagggttccgtgaccgtgggcgagtcccttgccctcctgaggcctcagcattctcatctataagtgcagacaccacacaccccacaggaagtcaagtgaggggggaggggaacgaaggtgcctgattgagagtggaaactcggaccttcttccttgctgcagaacgtcatgaaacacattaagtcgacaacagctaagttgctaaagcaaccacaatagtgtaaggacctgccaacagacagacgtgaagaaaacacgaaggtctgagacgtctatctaccgaccacgcttctccttcagactggagcgaggagagagacacgctcacaactcaatttcagcagaacaccctggaatgcttggcttttgggtcacagcatgagaaaaccgtggggccaggaagatgaggctcaaaggcagatgtggacacagatggacatgcaggcagctgcaggcgccacagacacggctcgtggggacaccctcactaccaaggagcagcctcaggcccagaaacacacctgctccctcaggacctgatgtgagacccacgttcctgtgagccggactcatgggcacacgaggaggagaggagagagctctgaaagccagggtggggcaaggatggcatcccagtgcccccagactcccaggcggaaggcaaatcgcacatgcaagcacttttcagccgggaggtggactgtcaggctggttctgcttctcagatggaggcgagtctccctcctggagacacctgtcaatgtctggacacagttttgggtgtcaccactggggactgggtggaggctgcttagcaccctgcagtgcccaggacagacccaccccaaagaatgatcaggcccaacatccacagcgtcgaggttgatgtcagcttttcaacatattctcaaagaggtccaggccctaccggtgctgccccgctggtgctggggacttggagggccctgcagtttaggtggcatcatgcagctgggtcctgagagcccagtggacagcagcaggcccctggagaccccggagacgaaggggcacaccgaggtggccagggccccactatccaggccagaaacaaagatgttatccttgacacctccttccacccactggatctgagccggtccatcaccagcccggtggctctgcctgtctcccatcagccaccgcccggtccctgcctccatcacctttcaccagagccacagcaacagcctccctccttgctgatcacctgctccaggacattctcccccagcagccaaacaatctttcacgacacaaatgcaatggagccgcttccctcttggggtgtcctgggggcctcccattattccctggatagagatcaaagccctccccacagcctgccaggtccgcattccggctcaggccgacctctccagactcactcatctcacaccctgccactcctggctccctcaagacaagccaaattgccccttcctgcctctgctcctctgccaggaactcccttccccaacctcactagacagccttgcccaacccaaccaccctttgcacctcactgccaacgctctcagagtcctcaaagctgggacaggaccccttacacgctctttccacagcttgtatttttcacacgtttggccagatctccccccacctccaaaccagaaactctatgagagcaggaccatgacctgccactcactaaaggaatgggcaggtggtaggcagcacagaattaaggaggaagcacaggaggaaaagaatccccaaggtccgccagctttgacagggaagggaaagtctagtctcctctcctctccagccacaggtacctggaacctccctagtgtcactaatgggcgtggactggggagtgcaaacccagacgcctcactcactgggcacacacccttgacaccctgaatcccaccaattccgttcccacgcacttaactgggcaaccctctgcaagctagaggtgttctgaggaccagcaagcaaccgagcagccaaaatactggaagatgacctacatatgggagacggtgactgcacctcactcaaccagtcagggtgggaaacccgcctggggggaggcgcggccatatcagagggcagacaaacgggccaggtgacagggggatgggacagagggacaagcaggagcaaaatccgaggtgacagagcaggctcctggctagagcagaccctgggaggaagaagtgagcagaagggtcctaagagagagcctgggacgggtgaggtcgcgcccccgagagtttgcacttcatcctgggagaaatggcggggccgcgaagaagtcccgagcaagcgatggacaacataggagaagggctgcatcccggagaacggacgcgagcggaggccgggaagcccgcccaggagtcagggtggcaggaagaagcctgacaagggaaacagcgactgggagctggttgggaagcagggctcgggagggcccctgggagctgccttggggggcgagaggccgaagcgtttgtcggactgggggcagtttcggggcaaaagagcggaatccgcggctcggacgggtgctccccgaaggcaagggccgcgtccgcaggagggtgggagcgcaacccacgccggagggctgaatggatggggacagggctttcccaatcacagacgctcatccgcggtccgcgcccctgctctgggctcctcgggcaggacccgcggaagccctgggactgcaggggtctcggggacgtccaaccgggctgtcaggccctcgaggcccggcccgggaccccgcgcggccgcgcccgcccccgcccctgcccggcactcaccaccccggcccgcgcccccgggccccagggccgcgctccatggctcccggccgcccgcccgtgcgtccgtcggtccctccgcacccctgcccggcctcctgcaccgccaccgccgcagctccccccacggacggaagtgagcctcgttctcaccaccgccccggaagtgacgcgaggagcgcgcggggcgggggtctgcaggcacagagcgaccgcgcgactagcgtcctgggggcggggctgatatgtcgaggggcgtggcctgctgctctgtgggcggggccaaacttaggtttcattcacttggggacccggaataggttgaggccagtaaagttctcgcctggaaaacaaaatttacagggacgccaaaaaaaactcagacatcaacatttagaaatgttttaaaatatttttctttatgagatggagtcgcgctctgtcgcccaggctggagtacaatggcgcgatctcagctcactgcaacttctgcctcctgggatcaagcgattctcctgcctcagcctcctgagtagctgggattaccggcgcccaccaccatgcccagctaatttttgtgttttcagtagagacggggtttccccatgttggccagtgtggcctcgaactcctgaccccagaatcctcctgcctcagcctcccaaagtgttgggattacaggcatcagccaccgcacctggcctcttttttttaacatagagtctactctgtcacccaggctggtgccatcatagctcactgcagcctcgacctcccaggatcaagtgaacctcctacttcagcctcctgagtagctaggactataggcacaagccaccatgaccagcttatttaaagtctttatatattgctcatcagaaattcttttgcattagtttttaaaatattacattaggccgggcacggtggctcatgcctgtaatcccagcactttgggagactgaaacaggtagatcacctgaagtcaggagtttgagaccaagcctgaccaacgtggtgaaaccctgtctctactaaaaatacaaatattagccgggcatggtggcacgcgcctgtagtcccagctactccggaggctgaggcaggagaatcgcttgaacccgggaggcgaaggttgcagtgagccaagatcgggccactgtgctccagcccaagtgacagagcaagaagactgtctcagataaataaataaataaataaataaataaataaataaataaataaaactatgatcactccactgcattccagcctgggcgagagagcaagatcctgtctcttaaaaaaatttcattatgggctgggcgcggtggctcacgcctataatcccagcactttgggaggccgagtcgggcagatcatgaggttaggagatcaagaccatcctggctaacacggtgaaacctcatctctactaaaaatacaaaaagatagccgggcgtggtggcgggcgcctgtagtcccagctactcgggaggctgaggcaggagaacggcgtgaacccaggaggcagagcttgcagtgagctgagaccgcgccactgcactccagactgggcgacagagcgagactccgtctcaaaaaaaaaaaaaattgcattatggcagggcctagtggctcacgcctgtaatctcagcactttgggagaacgaggcaggcagatcacctgaagttaggagttcagcctggccaacatggtgaaatcctgtctctactaaaaatacaaaaattaggccaccctggccaacatggtgaaaccccatctctactaaaaatacaaaaattagccggctgttgtggcgcgcacctgtaatctcagctactccacgccactgcactccagcctgggcgacagagcaagactctgcctcaaaaaaaaaaaaagtaaagaaaagaaaatggaagaaggttactggagaatctcagagcgtggtcagggcaggcctttctaaggaagtgacagggacaggggcagaaagggctgcagacaccaaaggggcccagcctggaagtgtgagtgtgaattggtgggaagccttgcttttcaggccttctctcatatgtgccttccccccagctttcgtgccttttccagctcaaaatgctcctccagcctgcaggcaaccgcagcccccgctccgtcccagggactctcatcttagctccactgttctgagataagcctgaggctcctgggccaatcctgcccccaggggctcattcctcaaattcaggacacagctgccagggaaggaatcaggctcaaaagactagagacttagagatagcccagggtttctttgcctcattttctttcctctttttttttttggttgttgttgttttgagacagagtcttattctgtcacccatgttggagtgcagtggcgcgatctcggctcactgcaacctccacctctcagattcaagctattcttctgcctcagcctcccgagtagctgagctaacaggcacccgccactgcacccggctaatttttgtatttttagtagagatggggtttcgctatgttggccaggctggtctcgaactcctgacctcaagtgatctgccagcctcggcctcccaaagtgctgggattacaggcgtgaaccaccgcacctggctgctttgcctcattttctgattttccggtgttgttggacctctggcgcccctgctcaggactcagctgcctgggtctccctggggctgtcaagagctgccccagcgttcccctgcctctgctgtccccctcgaggctcccagcctccgctgaggttctcctgaggtccaaaggccaaaacaagtccaggcttcttcctaggtccttgtgaattctctgagcaccagggccagaagaggcctgtccccagcctccttcccccctcccatcttccctgcagccccttcccactgtgagctaggcaggaccagggctggaccgcaccagaaagcccagctccacttgtaaacgacagcccccacagggacacagggagacaccatccaaggggaggaggataagcccgcagggtggcccaccaatccaaggccacctggtgaaaggtaaacgcacgctgtaaacactcaaatgtctcagaaggacacccatcccttcctcctccccagagaccctttgtgatcgagcctctgtcccaattgtcccagaaaatagtgggtgctgtggctcatgtctgaaccccagcattttgggaggccaaggtgggaggattctttgaggccaggagttcaaggctgcagtgaggtgtgattgcaccactgcactccagcctggatgacagagggagatgctgactctaaaaaataaaaatgagggctgggcatggtggctcacgcctgtaatctcagcactttggaggctgaggctggaggatcacttgaagtcaggagttaaagaccggcctggccaacgtggtgaaaccccatcttttttacgttgttgtttcttttttgaaatgttgtctctcactgttgcccaggttgaagtgcaggggggtgatcttggctcactgcaacctccgtctcccgggttcaagcaattctctgcttcagcctcccgagtaactgggattataggcgcctatcaccacatccagctaatttttgtattcttagtagagatggggtttcaccatcttggccaggctggtcttgaactcctgacctcgtgatccactcgccttggcctcccaaaatgctgggattacaggcgtgagccaccgtgcctggccgatgaaaccccatctctactaaaaatacaaaaattatctgggcatggtggcagatgcctgtaatcccagctactctggaggctgaggcaggagactcacttgaacccaggaggcagacgttgaagtgagtcgagattgtgccactgcacttcagccagggcgacaaagtgagacttggtctaaaaataaaataaaataaaataaaaaatgaaaatgaggccaggtgctgaggttcacacctgtcatcccagcacttcgagaggccaagccgagtgcatcacttgaggtcaggagttcaagatcaggctggtcaacatggagaaactccatttctactaaaaatacaaaaattagctgggtgtagtggttcaagcctgtaaccccagctactcaggaggctgaggcaagagaactgcttgagccagggcggcagaggtcacagtgagccgagatcacagcgttgcactccagcctgggcgacagagcaagactctgacttcaaaaaaataaaataataaaaaataagtccgggcgccgtggctcacgcctgtaatcctagaactttgggagcccgaggcgggcggatcacgaggtcaggagatagagaccatcctggctaacacggtaaaaccctgtttctactaaaaatacaaaaaattagccgggcgtggtggcgggcacctggagtcccagctactcgggaggttgaggcaggagaatggcgtgaacccgggaggcggagcttgcagtgagctgagatggcgccactgcactccagcctgggtgaaaatgcgagactctgtctcaaaaacaaataaaaataaaaataaaaataaaaataaataaataaaaaaaaatgaaaaaaatcatacattgaaaatggggggagccactagtccctcttccccttcatggtctgccccagccatgctggcctggccaggagtgctgctgcctcagggcctttgcaggtactatggctcctgcctgcagggcccttccccatatggccccctggcttccttctccagcatcctctggctctacaggagggccacaacatccaagagcttctgctaaccaccccagctaaatcccaaccacatacatacacctctaccccattacctctatcccatcaccctgtttatttccactgcaatacttaccactctcagattctcttttttttgagacaagagtctcactctgttacccaggctggagtgcagtgactcgatcttggcccacagcagcctccacctcccaagttcaagtgattctcctgcctcagcctgccgagtagctgggaccaaaggcgtgcaccaccatgcccagctaatttttgtattttttgtagagatgggatttcatcatgttggccaggctggtctcaaactctcaggctcaagcaatcctcccatctcggcctttcaaagtgctaagattacaggcgtgagccaccatgcctggcaattgttgggttttattctgttttgttttttgaaatgaagtttcactcttgttgcccatgctggagtgcaatggcacgatctcagctcactgcaacctctgcctcccgggttcaagcgattctcctgggttcaagcgattctcctgcctcagtctcccgagtagcatgcgccaccacatttagttaattttgtatttttagtagagacggggtttcaccatgttggtcaggctggtctcgaactcccgacctcaggtgatccaccggcctcggccccccaaagtggtgggattacaggggtgagccaccatgcctgcccaattgttgttttttttttttttagttttatttatgtttatgggaaatacatctgcaagatgtggtggttactctttttttttttttgagagggagtctcactctgttgcccaggctggagtgcagtggtgcgatctccgctcactgcaagctctgcctcccgggttcacgccattctcctgcctcaacctcccgagtagctgggattacaggcgcccgccaccacgcctggctaattttttaaatttttagtagagatggggtttcactgtgttagctaggatggtctcaatctcctgacctcgtgatccgcctgccttggcctcccaaagtgctgggattacaggcgtgagccaccgcgcctttttttttttttttttttttttgagacggagttttgctcttactgcccaggctatagtgcagtggtgcaatctcagctcactgcaacctccgccttctggtttcaagtgattctcctgcctcagcctcccaagtctctgggattacaggcccctgccaccataaccagctaattttttttgtatttttagtagagatggggtttcaccatgttcatcaggctggtctcgaactgctgacctcgtgatccacccatctcagcctcccaaagtgctgggattgcaggcatgagccactgctcctggccaatggttactcttatgtgtcaccttgactgggctaccatatatatagctggcacaacatcatttctgagtatttctgtaagaatgtttccgaagagattaacatttgaatcagtggagtggctatacccagttaattttcaatttttttgtagagatgaggtcatgctatgttgcccaggctggtctccaactcttggcctcaagcaatcctcccacctcagtcttctaaagtgctgggattacagacatgagccaccatgcccggctaatttttgtatttttttttttttttgagacgaagtttcgctcttgttgcccaggctggagcacaatggtgcgatctcagctcactgcaacctccacctcccgggtacaagcaatcctcctgcctcagcctcccgcgtaccttggattacaggtgactgccaccacccctggctaatttttgtatatttagtagagacggggtttcatcatgttgaccagtctggtcttgaacttctgacctcaagtgatccacccacctcagcctcccaaagtgctgggattacaggcgtgagccaccgcgcccagccacatatgctatttgtttcgggaatcctctcatgcaaagcaaggggccccaggagctgacctgccgtctccatgctcagtcccctcttgacggacatgtagggtgtttctggctttggctgcaacaataatggcacatgagacgtttcacactgatggataggaccctgcagggaggattcctggaagaggaggtcccatgagaaggtccatgctgctgtgttcagaaagcaatcctgggtctccccctgagaaaaccccccacagagggaccgagatagatgatgtgggagaacaaggtactgggtgactttttttttttttttttttgagtaggagtctcactctgtcatccaggctggagtgcagtgatgtaatcttagtttactgcaaactccgcctcccgagtccaagcaattctcctgcctcagcctcccgagtagctgggattacaggtgcccgccaccacgcccagctaatttttgtatttttaatagagacagggtttcaccatgttggccaggatggtctcgaactccgaccttgtgatccacccgcctcggcctcccaaagtgctaggattacaggcgtgagccaccgcgcccagccataatttttgtatttttagtagagacagggtttcaccatgttgggcaggctggtctagaactcctgacctccagtgatgtggctctcttggcctcccaaagtgctgagatgacaggcgtgagccacagcacctggcctaaaactagatttctctttttttttttttttttgagacagagtctcgctctgtcgcccaggctggagtgcagtggcacgagctcggctcacagcaagctctgcctcccaggctaaaactagatttctaaataagctttgtgattaaatactaatatttatacttttcagcatatacttacaagaatgggactgggcgcggtggctcatacctgtacttccagcactttgagaggccgaggcgggcagatcacgaggtcaagagttcgagaccatcctggtcaagatcgtaaaaccccatctctactaaaaatacaaaaactagctgggcgtggtggtgcgcacctgtagacccagctgctcaggaggctgaggcaggataatcgcctgaacccgggaggcggaggttgcagtgagccgagattgtgccaatgcactctagcctgggcgacagaacgagactccgtctcaaaaaaataatggaaaacagggatttccatagatatttgcacacctatgtcagtagtaccttgattcccaacagccacaaggtagcaacagtcccagtggctatggacagatgactgggtgaacacagcatggcctatacacacgctggaataggaggcagccatgaaaaggagcgaggccgggcatggtggctcacacttgtaatcccagcactttgggagaccgaggcaggtggatcacgaggtcaggagattgagaccatcctggctaacacggtgaaaccccatctctaccaaaaatacaaaaaattagccaggcgtggtggcgggcgcctgtagtcccacctactggggaggctgaggcaggagaatggtgtgaacccgggaggcggagcttgcagtgaaccgatatcgcgccaccacactccagcctgggagacagagcgagactccgtctcaaaaaaaaatatataatataatataaaaaaagaaaaaagaaaaaaagaaaaggagcgaggctctgactcaggccacaacgcgcggatgcactttgaggacgttacactcagcgggaggcgccagacacaaaaggacacgtcttgtgtgatccactcctaggaggtccctcgagtcctcagattcacagagacacaaagtaggatggaggccgccaggagctggggaggggaatggggagtgagcgtttcatggggccaagtttcagtttgcaaagatcagaaagttctggaggtgatggtcgcacaaccgtgtgaatgagtttaatacggctgaactgtgcacttaaaatggttaagaggccgggcgcggtggctcacgcctgtaatcccagcactttgggaggccgaggcgggtggatcacgaggtcaggagatcgagaccatcctggctaacacggtgaaaccccgtctctactaaaaatacaaaaaattagccgggcgtggtggtgggcgcctgtagtcccagctactcgggaggctgaggcaggagaatggcgtgaaccggtaaggcggagtttgcagtgagcggagcttgcgccactgcactccagcctgggcgacagagcgagactgtctcaaaaaaataaataaataaataaaataaaagggttaagatggtcaactttatattatgcgtattttaccacaaccaaataaatcaatgttcataaaaccacggagttagacgagctgtttggttagcgccagcttcgcaggcagaggcctcaggggtccgctggggacccacactcagaggaatctaggcatgatataatgctctgtggttgctgtctcaaaattcctaaaaattggctgggtgcggtggctcactcctgtaatcccatcactttgggaggcccaggcgggcggatcagctgaggtcaggagttcgagaccagcctgaccaacatggtgaaaccttgtctctactgaaaaaacaaaaattagctgggcgtggtggcgcatgcctgtagacccagctacttgggaacctgaggcaggagaattgcttgaactcaggaggcggaggttgcagtaagctgagatcatgtcactacactccagcctgggcgagagagcaagactccgtctctttaaaaaaaaaaaaaaaaaaaaaaaaaaaaaaaaggccgggctcggtggctcacgcttgtaatcccagcactttgggaggccgaggcgggcggatcacctgaagtcgggagttcaagaccagcctgaccaacatggagaaaccccgtctctactaaaaacacaaaatcagccgggcgtggaggcacatgcctgtaatcgcagctacttgggaggctgaggcaggagaatcgcttgaacccaggaggcagaggttgtcgtgactcgagatagcaccattgtattccgactgggcaacaagagcaaaaaaactgtcttagaaaaaaaaaaattctaaacatttttaaacaaggggccctgtattgtcattctgagcttggcctcaaagattctgtagccaggcttcttttggggaaaggaccgggaggcctccttccagggtcaggggcgttaagcgctgcggagggatacccctcccagaggggagagagtggaacccgctcaggaagtgggttcctgacatgagaaggaaggaagttggcgggggcatcttaaaatagcatcacccaaccacgcggtcagaggtgcggggagggagcagggccagggccggggaccctcccagcgaccttccctgcaggcacccagccccgtcccctcgacacaccagacccagcaccctctgctcccaccagcccaccaggaattgggttatttaagttatttatttatttccttattttctttttcttttgagatagagtctcactttgtcacccaggctggagtgcagtggcgtgatctcggctcactgcaacctccaccgcctgggatcacgcgactcttctgccacagccttctgagtagctgggattacaggcgcccgccaccaagcctggctaatttttgtatttttagtagatacagggtttcaccatattggccagtctggtctcaactcctgacctcaagtgatccacccgccttggcctcccaaagtgctgggattacaggcgtgagccaccgcgcctggtctatttctttttttttttttttgagatgaagtcttgctccctcgcccaggctggggtgcagaggcacaatctcggctcactgcaacctccgcctcccaggttcaagcgattcttctgcctcagcctcccaagtagctgggattacaggtgcccgccaaccacacctggctaatttttgtatttttagtagagacaggatttcaccatggtggccaggctgatctcaaactcctgacctcaggttatccgcccacctcggcctcccaaagtgctgggattacaggtgtgagccaccgcgcctggctgtaattgcctcttaaagagaaacaagtcagattggatttgggcgcaccctcaggacgtcatttgaacctaataatctctttaaaaagtcctgtctcggcgggggccaagcacagtggctcaagcttgtaatccaaatactttgagaggccaaggcaggaggatcactggtgcccaggagtttgagactagcgtgggcaacacagcaagaccccatctctacaaaaaaaaaaaaaaatatttggttagccaggtgtcggggcacatgcctgtggtctgagctactccggagcccaatgtgggaggatcccctgagcccaggagtttgaggctgtggtgagccgtgatcagctcccactgcactccagcctgggccacagagagagacttcctatctccacgccaagtgccttaggtcacgcctataatcccagcagtttggcaggcagagtgggaggatcacttgagccttacaagttcaagaccaacccggggctgggcgcggtggcacacgcctgtaatcccagcactttgggaggccgaggtgggcgaatcacgaggttaggagatcaaaaccatcctggctaatacggtgaaaccccgtctctactaaaaatacaaaaaattagccgggcgtggtggtgggcgcctgtagtcccaggtactcgggaggctgaggcaggagaatggcgtgaacccgggaggtggagcttgcagtgagctgagatcacgcctctgcactccagcctggaccacagagcgagactctgtctcaaaaaaataaaaaaaaaatagccgggggtggtgtcgggaagctgaggcaggagaatggcgtgaacgcaggaggcggagcttgcagtgagccaagatcatgccactgcactcctaggcgacagagcgagactccatctcaaaaaaaaaaaaaaaaaaaaaaaaaaaaaaaaagaccagcctgggcaactaagagagacctctgtctctgcaaaaaaaaaaaaaaaattttttttttgagacggagtctggcactgtcacccaggctggaatgcattggcgtgatctcagggttcacgccattctcctgcctcagccccccggatagctggattacaggcgcccaccaccacacccggctaattttttgtatatttagtagagacggggtttcaccgtgttagccagggtggtctcgatctcctgacctcgtgatccacctgcctcggcctcccaaagtgctgggattacaggcgtgagccaccgcacccgggtgacactccatttttgaccccagtgttagcacagagcttttaaacttccgcactgctgatgagggagtgtgattgttctctgttaccagcactgtctcccgcccaccggagccgagtgtggtgggtgtggaccttctgggaaagggtgtaaacacgtgcttagatccggccggaagccccgtgaccggggtgcagctgcctttggtcagtaggtggcaaccgtgtccgcttgattttgggagggtccgagaggctggtgcagggctcccaggagaggcgggggcgatcccacttgccttgccaggataacagcaacaagggctgcccacgtgcatgctgggcaatagggataccgcagagaatgaaagtccagccctagcagggcagcaagacctcgactctacaaaaatttcaaccacaacaaaaattagctgggcgtgacggaacacatctgtggtcccagctacatgggaggctgaggtgggaggatcgcttgagcccgggtggcaaaggccacagtgagctatgactgcacaactgcactccagcctgggtgacagaggcagatcttgtctcaaaaaaaaaaaaaaaaacaaaaaacaaaacaaaaacaccaaggccaggcacggtggctcatgcctgtaatcctagcactttaggtggctgaggcgggaggatcacctgagatcaggagttccagaccagcctggccatcacagcgaactcccatctctactaaaaatccaaaaattagccaggtgtggtggcaggcacctgtaattgcaactactcaggaggctgaggcacaagaatcgcttgaacccgggaggcgaaggttgcagtgaaccgagatgtcactgcactccagcctgggggacagagtgagactccatctcaaaaacaaaacaaaaaacaccaaaacgtcctgtcctggtggaggtgaaataaatgagacatccttggccgggcgctgtggctcacgcctgtaattccaacaatttgggaggccaggcgggtggatcatgaggtgagaccgagaccatcctggctaacatggtgaaaccccgtctatactaaaaatacaaaagttagctaggcgtggtggcaggcatctgtaatcccagctacttgggaggctgaggcatgagaatcgcttgaacccgggaagcacaggtagcagtgagctgagatcgtgccactgcactccagcctgggagacagagcgagactccgtctcgaaaaaatatatgtatagccaggcgtggtggctcacgcctgtaattccagcactttgggaggccgaggcgggcggatcgctaggtcaggagatcaagaccatcctggctaatgtggtgaaaccccatctctactaaaactataaaacaattagccgggcgtggtggcgggcacctgcagtcccagctactcaggaggctgaggcaggagaatcgcttgaacctgggaggcggaggttgcactgagccaagattatgccactgcactccagcctgggtgacagagcgagagtccgtctcaaaacaaacaaacaaacaaatcagaaagttaatgggatgctgacgcaaagaaacaagctgaacaaggtggtgacagggaagttgatactgattttggcctcagccatgtggaaacagacagagggtcttgcggggaactcctctccttttttggacgcattcctgttttgttttgttttgttttgtttttttaactttcttaatttttttcagttttcgtcacactttgtctaatactatttcttttttgtttttgagacagagtttcgctcttgttgcccaggctggagtacagtggcacaatctcagctcactgcatcctctgcctcccaggttcaagtgattctcctgcctcagcctcccgagtagctgggactacaggtgcccgccaccacgcccggctaattttgtatttttagtagagacagggtttttccatgttggccaggctggtctcaaactgatctcatgatccgcctgcctcggcctcccaaagtgctgggattacagacatgagccaccacgccctgcctaaaatatttgttttcataattaaaaacattgtttcttagccaggccctgtggctcatgcctataatcttaggactttgattttttgtttttgtttttgtttttgagacggagtttccctcttgttgcccaggctggagtgcaatggtgcaatcttggctcactgcaacctctgcctcctgggttcaagcgattctcctgcctcagcctcctgagtagctgggactacaggcatgcgccaccacacctggctaatttttcgtatttctagtagagacggggtttcaccatgttagtcatgttggtctcgaactcttgacctcaggtgatccacccgcctcagccttccgaagtgttggcattacaggcgtgagccactgtgctggctttttttttttttttttctgcgacggagtctcgctctgtcacccaggctggagtgcagtggcgccatctccgctcagtgcaagctccgcctcccgggttcacgccattctcctgcctcagcctcccgagtagctggaactacaggcgcccgccaccacgcccggctaatctttttattttttttagtagagatggggtttcagcgtgttagccaggatggtctcaatctcctgacctcatgatccacccacctcggcctctgtacttttttcctattggctggggtcgggtcacacaatctaaactaactttggttggctaaacatttgattttttttagatagggtgggtatgtaaaagaaaggggaggccgggcgcggtggctcgcgcctgtaatcccagcactttgggagaccgaggagggcggatcacgaggtcaggagatcgagaccatcctggctaacacagagaaaccccgtctctactaaaaatacaaaaaattagccgggcgtggtggcgggcgcctgtagtcccagctactcgggaggctgaggcaggagaatggcgtgaatccgggaggcggagcttgcagtgagcggaaatcgtgccactgcactccagcctgggcaacagagcgagactctgtctcaaaaaaaaaaaagaaagaaaaagaaagtggagagaatggggaagggggtgtctgtgatgagctagaaagttagtctttttttaaaataaggaaaggaatgtaagctgatgctgataacgcttggtattgaggcgtgtctaggcatttaacaaaggcaaaaaggaaaaagaaaaagaagggaaaggaggggtactatgaattaaagaataaatgattgatcagattatttgaagagaaaccccattatatcccacaactagaacccctggcctgaagtggtccacccgcctcggcctcccaaagtgctgggattacaggcgtgagccaccactcccagtcttatttttattttattttgttttgttttgttttatttatttttttagagtctcgctctgtcacacaggctggagtgcagtggcgtgatctcagctcaccgcaacctccacctcccgggttcaagctattctcctgcctcagcctcctgagtagctgggattacaggcgtgcgccaccacatccggctaattcttgtatatttagtagagacggggtttcaccatgttggtcaggctggtctcagactcctgaccttgtgatccacccacctcggcctcccaaagcgctgggattacagctgtgagccaccatgcctggcctattttttttttccttttttttttttagacacagtctccatctgtcacccaggctggtgtgcagtggcgcaatctcagctcactgcaagctccacctcctgggttcacgccattcttctgcctcagcctctcgagtagctgggacttcaggcgcccgccaccacgcctggcttttttatttttagtagagacggggtttcaccatgttagccaggatggtctcgatctcctgacctcgtgatccgcccaccttggcctcccaaagtgctgggattacaggcgtgagccaccgtgccccgcccaggcctatttttttaaagacaggatctccctctgttgcccaggctggagtgcagtaatgctgatcaaagcccactgcagtcttgacctcttgggttcaagtgatcctgccacctcagcctcccaagtagctgggaccacaggcacacaccacacctgggtaatttaaaatttttgtgtagagacaaggtctcactatgttgcccaggctggtctcaaactcctgggctcaagcgatccttccaccttggactctcaaagtgctgggattacaggcgtgagcccccgagcttggtcctggtcatttcttgactgcctgtcacttggggccacccagcccgccagtgtctgacttaggcttctggctgattctctgcggccactaagctcacaattggggaaccgactccatgattttgcaacatttcgatgccggaccctgacgcattactgtgagtcgggagggtcacgttccgtttgttttttgagacggtctggctgtcacccaggctggagtgaagtggcattggtgtgatctcagctcactgcaacctctgcctcctgggctcaagccatccttctgccgcagcctcccggcatgtagctgagactacaggcgccaccattcccagctatgttgtttttttttttttaaagaaagagacaaggtctcgctgtgttgcccagggcaatttcaaaattcctagactcaagcaatccctccgcctcggcctcccaaagtcctgggattacactgggattacaggtgtgagccagcacaccggctgtgggccacattacttttgaaaagttctggataaaggccgggcgcggtggctcatgcctgtaatcccagcactttgggaggccgaggcgggcggatcacgaggtcaacagatcgagaccatcctggcgaacatggtgaaacccccgtctctactaaaaatacaaaaaaatttgcggggcgtggtggtgggcgcctgtagtcccagctactcgggaggctgaggcaggagaatggcgtgaatccgggaggtggagcttgcagggaggtggagcttgcagtgagctgagatcgcgccactgcactccagcctgggcgacagagtgagactccttctcaaaaaaaaaaaaaaaaaaaaaagaaagaaaaagaaaagttctggataaagaacaatgtcaattaaaaaaggggtcccatcagtagaggctgaaatcatgactgaaactagcttaaagcccaaagcaaaacaaaaacccgaaagaaggccaggcatggtggctcgcactatcccagcattttgggaggctgaggcaggtagatcaccagaggtcaggagtttgagaccagcctggccaacatggtgtactaaaaaatacaaaaattagccagctggagcgcagtggcgcaatcatagctcacttcagccttgaccttctggactccagtgatcctcccacctcggcctcctgagtagctgtcccagctgtcccacttactcagtgcccctccggacccagcaattctttttttttttttttttgcagagatggcagcatgtctcaaactcctggcctcaggcaaacctcatgtgtcagcctcccaaagtgctggaattacaggcacgagccaccatgcctggcctagattcatttttttagatgcagagaatctgggctttggatttaatgacttaccaaataaaggctgtcttttttttttttaaaacaaatcagcaaaacaggggctcttggctagtttgcatgaggcatccagggatggagagatgtgtatttaagctaaaaaaagaaaaagtgaaactcacagcagtctgagtttttattcagaaaaggaaaaaagaaagcaactgagagcgaaatagtttcctggaatgctgtttttttttttttttttttttttttttttttttgagatggagtctcactctgtcgcccaggcaacagagtgcaatggtgcgatctcagctcatcgcaaccttcgtctcccgggttcaagtgattctcctgcctcagccttcccagcagctgggattaaaggcccctgccaccatgcctggctaatttttgtatttttagtggagatggggtttcgccatgttggccaggctggtctcgaacccctgacctcaggtgatccacccaccttggcctctcaaagtgctgggagtacaggcatgagccaccgcatccgaccttgaaatgcactttctttgaaacacgtcctcccctttctcaccataaactccctcacactctgcaggtttacctaactgtatgcatctaattatgtgattacctaaaagttccaggaacaggctgggcacggtggctcacgcctgtaatctcagcactttgggaggccgaggcgggcagatcacctgaagtcaggagtttgagaccagcctgaccaacatggagaaaccccatctctattaaaaatacaaaattagccaggtgtggtggcgtgtgcctgtaatcccagctactcgggaggctgaggcaggagaatcacttgaatctgggaggtggaggttgcggtgagctgagatcgtgctgctgcactccagcctcggtgacaagagcgagactgtctcgaaaaaaaagaaaaaagaaagaacgttttagagctaatctggagacaggccaagcacggagacccacctgcaaaatcccagagatttcctcaaggtggtctgcaacccggcccttattaggatgaggccagcctgcgcttttaagccaccaaaattcatgaacacacagagcttataatcagcacctcccctgcacacccaccattcccagttccccttttttagcccctcaccccagcctcaagtttgaaggggtttctggaggcctaaaccagctgcctccctgctgcgaactctgaaaggaagtcaccttcctttcactgcactttttcctccttactggtttgtcaagactctggcatcggagcctgagctggttacagccaggcactgtcaagctgttgggggaggggatgacaaattccctcccgttgagaaccacttggttaaacctgtccaactggaaggagtaacaaattgctcataaaatatgcatgttttggtgaaaccccttctctactaaaagtacaaaaactagccagaaatcgcttgaacccaggaggtggaggttgcagtgagcctagcactgcactccagcctgggtgacagactgaggctacgtctcaaaaaaaaaaaaaaaaatgtgcttgtttggcccaggagaggcaagaggtcttcttcacctacgttactggtgagaaaactcaaacctgagggcggcccacgccggagtgcagtaacaggcagaactggaacctggccccatcccggactcaggggacgggtgtcatataccccctctgcctcatccttcccactctgctaaccttccaaagatcccccgggttccgagttttccctggccgcttgatgggattcgaacctgcaaactcagcgctcgcccagcgcagcggccccgcctctcctcccctcccgccgcccggaggtcatgtgagcgcagtgccggagcggggcggggcgaggcggcggcgcgcagtgcctactagcaattgtagtccttgccccaccttggcctggcgaagatcccgcccctggaactacgctcccgtcgtgctccgcggctccaggcggagacgaggcggggtgaggtgggttgggccgggccggttgctaagacttggcgaagcgctgcgctcgcgcccggatccctcaggtaagcgcgcggccccgaggtctcgggttctccaggctcagacttccccagagggggagtaggggctgacatggggggtctcggcggtgaggggcgccggccgtttgtggggagaaaacggggggcccaggccagcctcgcgcgcgtctcgggcgggccggtgggcgacgcggggaggcggcgcgaatgcgcgtgcgcgcgcgcgcgcggcgctggcctgggggaagcctcaggaccgcgctcccccgggcctagcgcctttctgcgcgtgtgcgcccttatggtcggtgcgggagaccccgtatcctccagctgcttccggtggcccttcctcaggtcatgtcccgcagtcccctgcctctgaaccgcgctctcgcgagtttccgtagccttcgcgtccttcctccccagctctgattcgcctttatgtggagattcccctaggccttggtacatccccagaattgaccatcgttcctcatcgttacctagagtatgagtttttcaggtttttgtatcacaggcccccagttatctcccacacactaccccgaggaccgaggttccccgctgtcttgcagagaaggcctccttgtagggtggccagaaacagaggatcgactccgtggaaacaaggacggctgggtgcagttcctcaccctataaccccagcactttgggaggccaaggcgagtggatcacctgaggtccggagttcgagaccagcctgtctaacatggtgaaactccatctctgccaaaaatacaaaaattagctgggcgtggtgtcacgcgcctgtaaaaccagctactggggaggccaaggcaggagaatcgcttggacttgggaggtggaggttgcagtgagccaagatggcaccattgtactccaggctgagcaagctagcaagactcactctccaaaaaaaagaaaaaaagatttttttttaataagccaggcatggtgacacatgtctgtggtcccagctacttgggaggctgaggcaggaggattgcttgagccccggaggttgaggctgcagtgaactgtgatggcactactgcattccagcctgggcaacagagcgagaccctgtctctaaataaataaataaaatacatacgtgtagcgccggccgtggtggctcacgcctgtaatcctagcactttgggaggccaaggcgggtggatcacgagatcaggagatcaagaccatcctggctaacacggtgaaaccctgtctctactaaaaataaaaaaaagccaggcatggtggtggacgcctgtggtcccggctactcccaaaggaggctgaggcaggaaaatggtgtgaactcaggaggcagagcttgcagtgagccaggatcgtgccactgcactccagcctgggcgacagagtgagactccgtctcaaaaaaaaaaaaaaattgtgtgtgtgtgtgtgtgtgtgtaaagaaacaagccccaggctgggcgcagtggctcacgcctgtaatcccagcactttggggggcctaggcaggtatatcacaaggtcaggagttcgagagcagcctgaccaatatggtgaaatcccacctctactaaaaatataaaaaattagccaggcatagtggtgcacatctgttgtcccagctgcttgggaggctaaggcaggagaattgcttgaaccagggaggcagaggttgcagtgagccaggatcgcgccactgccctccagcctgggggacagagtgagactgtcccaaaaaaaaaaaagcccccacgcagactattggtgtgccctggaactgagcattagctgttccctctccgagttctctcccctacttccccagccttccaggctgggctgtgggtcactgcctccgaggagccctcctggattctgctgaagatggtcaggcccctccatccccccattttctcttatgtacctgacagccctgccttaaaaaaaaaaaaaaggtagagcaggaattcccatttcacaggggtggaagccgaggcttggaggagtcaggactggtgcctgagttctcgcagtcaggaattgaccgcgctgggctgaacgcctctagggcaggttggggactgggtgtgttttctgggtggacatacccaggtcccggcgcggaccttggcctcctcatctgtgggcttagataaaggcctcccagcctcctgttcaccagggttgtcaccacgcagggtctgactcacctgcctggagctatgccggttcccagcccaggctggcggccgtgttctgctgggacctgggacctgggctgcctgccctcctgaggggtcccagtggtcggtcgcctgccttctgggtgggtgtggtagagggagggtcaggtggccccctgctgttggggggcagtcgctgtgggagtgagtcgtccccccgggccatagcaggtaggtaggaggtgctctggcagttgaggccgccctggcctgggacagtcaatcagcctgaacactgtgcctgttccgggattttgacctgccctccaagggcgcggcgggcccagcctgcagtgtcccggcagctgcctcctctctgggtcgtttgtttttcatcagacagaggttgtactcttggagggacaagcgaggctgtgtttgtcttttaccctggagacagtggagtgtttgtggcctagcagggccgtgcgggcctctcggtcctggtcgcgcgtggtgtgcgttttgggagggcccagcgagtcggctgctatgggccccacctggcacggggcctcgggcagcggcagcacctggcgctgcctccgcgcttcctgctcccggctcccactgcatctccggttctgtgctttgttgaacgcgtgagcttcgggcagcgctggggccgcttcagcgtgacctccaaggccactggcctggagttccactggctgctggtcccccatctgtggggcgccccggcggctgaggcgtggaccaggcagtgcatgtcgaggagtagcacccacagctgcgcggctgcgaaatgatccagagacacatccctgtctgcgggaggagccgtccataccagcggggatgtgtagtccaggctggcagttcaggatcacccggctggagtcattttaagatcatctgcggcttagccccagcaccatctgaggcagtactgtctgctagaaataactgtgagcacacaggtagtaaggtttttaggattttattattatttatttatttgaaaaaaggaacagggtctctctatcttgcccacgttggtctcaaactcctgtgcttaagtgatcctctcgccttggtctcctgagtagctgggactacatgtgcacaccaccgtgcccaactaatttatacttttaagcaatgtgggctgggcacggtggctcacacctgtaatcccagcactttgggaggctgaggcaggtggatcacctgaggtcaggagttccaagaccagcctggccaacatggtggaaccccgtctctactgaaaatacaaaaattagccgggcgtggtggcatgtgcctgtattcccagctactaggggggctgaggcaggagaatcgcttgaacctgggaagtggaggttgcagtgagctgagatcatgccactgcactccagcctgggcaacagagtgagactctgtctgaaaaaaaaaaaaatgtgggctgggcatggtggcttacgcctgtaatccaacctcaggcctgcggtgcgagtctgtgggggcagatgcaggtgggggaaggctggccagctgagactgtggtttgggggtgttcaggtggggtggatgccagagatgtgggagccagaggcgctgtcccccagggccctgtgagcagtccctgcaggctggctgtccccacgcctgcctctctgctgtgctgtctgcccgcctagggcaggctcccttctaatgggcggatcccgagagctgggggccccaccagcccttcctctccagtggagtggccctactgcctcatgtccacctgtgccagcagcagggatggtaatggctctactatctcctgtcctcacctgtgccagcagcagggatggtaacggctttactgcctcccgtcctcacctgtgccagtggctgggatgtcttcacctgtgccagcagcagggatgtcctcacctgtgccagcggcagggatggtaacagtgctggtgatgtcaggccgggaggttctcacccgagagccgccttggcacactgcccggcagtcagggatgttagcaggagccccgggagtgatcccagctcttcccgcagccccactccagccagggcctcctctgtgactgagtaagcagggacaccccagtggctgcctgctccacccgacagccagggcccaccacagctgcaggaatgtggtcaagggatgggaagtcgggcccaccaggggaggggctgcgctccggggcttacgtttcgtggcttgtcttctgaggtctctcttttcctagcccttggccgactagggggcgagtgtttacagaaaccactggaggtgggtgttccgtgtcagtgccaggctgtgtgctgttctgggagggggccccgtgtcccccacacttggcatgcttgctttctgtcactgcatagcagactccgtgcatctgtgggcttaatacaccacccgccagctcccggttctgtgggtcggggcctgaatgtgacatggctggctcctctctgcggggtctcaccgggctggaacccaggtgtcagccagggcttgtgttgtcatctggaggctcaacgggggtggcatctgcttgcaactcacgcaggcgttggcggaattc

SEQ ID NO: 3 - DNA, 168516 bp, Homo sapiens
gaattccaatgtattcatcgccaactagccatgttgctgggtgtgcgctctctcttttaggcgcaatgtgtcatttaggcctgtgacgtcggaactttattatttgaacatttaaaaataaatgaatccaagagcttgagtcacttggccaaaaatgcccaggaggaaaaggccaagtcaggtaccccggctctagagctactaactgatcgccggagaccctgggccttggaagaagtcgcctccccagatctctaagcaggccgcgcgaccctcgagtctcaggtaagcgggaaatcccacttcacaagaaagcccctctctccgaggcacgggcgcatgcgcgggtcggccacccgctggggccgcggggccgccgctctggcccgcgtggggcagtcgtccgcgtctcgctcatgatgacgcacgtccggggcggtggggaaggcaagatggcggcgcccatggaggtggccgtgtgtacggactcggcggccccgatgtggagctgcatcgtgtgggaacttcactcgggcgccaacctgctcacctaccgcggcggccaggcgggaccccgcggcctggcgctgctcaatggcgagtatctgctggcggcgcagctgggcaagaattacatcagcgcctgggagctccagcggaaggtgcggcggtgcggtctcgctgctggggtcatggggcgcccgaggctgaagtcgggggatgggttggtgggggccgcgtgcacccttagtcggaattggcgtggggaggggaggtggtctccgttcgggcgctctgcgcatgcgcgggtctgggggctttggggagatacgtgcgacctgttaggccgctctgcgcacgcgcggggctcaggcctgagctgctatgggggcagtgggggaaaatgggagacgctccggggggtcccttggggcaattgcgcatgcacgagttcttggagcgcgaaatttgattaaaaggggcctatgagctctgtggatgttgtggttctggaggaaaagggagaaggaccaaggtctgggggagtctcccatgaaggggtggcgcaggaaactcatgtttattcctccaataaagcaacagatactcaccgtcgcccacagtttcccctctactcccaagcccaaatgcagccagtccctgaagctactcgcttcccccgtgtgcccgctgagatctcttgggactggctctgtgctccagcattgcctgatggagtctacacacaactcataaatttctcccattttattttagttttgagacagggtctcactctgtcgctgaggctggagtgcagtggtgcgatctcggctcactgcagcctctgcctctagggttcaagcgattctcgggcctcagcctcctgagtagctgcaactacaggcccgcaccaaccaccacacccggcccacatttgtattttttgtagaggcagggtttcaccatgttggccaggctggtctcgaactcctgacctcaagtgatctgcccacctcagcctcccaaagtgctgggattacagccgtgagccaccacgcccggctgagttttcccattttagagaggaggaagctgaggcttggggtcttaggttggacattatggatagaaggattggggcacaagcctactgggctcttgggccccagtgtccttctggatcctctttgttctgttcctgtactcctcccacccagggcccctctgaccctcagaggaagcaccaacctcacatctaccacctccagcctcgaagcctcttgcaggggcgaacacttccttgctggaccatgcatttgctcaaaccaccctgctcccgactcctcttcctggttctctgacttagccattgcccaggcgtcccctcccctcgccctccactgctgtagtagctcccgtgtcctgcatggggctcacgaggctgactgtgcatccttaggaccagctccagcagaagatcatgtgccccgggcctgtcacctgtctgactgcatcacccaatggtctctacgtcctggcaggagttgcagaaagcatccacctgtgggaggtaagaggagcaaagcgtgagcgtttcccacaggacatctcagcccatctgagctttgcctgcagggcaccagggaacaaccatgcggcctggggccctgggatgggtgactgctcaggggttatagcctaagcttcaccctgctgcctcctttctccaggtcccctcgagacttgcgaatcccagaccagccctaatcctgccttgagtgcttggatagagcccggtgcagcccagtccccggcactcacacaccgcagcatcttccagggctagcgggcatctcttccacgcaggcggcagcgcctggcacttgtgacttgaaagttataaagggcggccgggcgcagtggctcatgccggtagtcaatgcaacctctgcctcccaggttcaagcaatcctcctgtctcagtctcctgagtagctgggattccaggcgcccaccaccacacctggctaatttgtttgtatttagtagagaagggcttcacaatgttggtcaggctggtctccaactcctgacctcaggtgatccacccgcctcggccccccagagtagtgggattacaggcgtgagccaccgcgcccggccagtgcctcctttttcttaccgctggaccaaccaggtgacagcaactcctagacacactcacagcccggatcctgccatgctctcactgcgagacagagtgaactgttcaggctttgcatttaggccagcttctcagctctgccctggtgaggggaagcagccctggatgatgtgtgagtgagtgggcacagagatgtgccagggagacttcattcacaaagtcaggcctcttggagtttggcccataccgtagctgtggcgttagatcaccggctgtgttgtcacaaatggtccattatatttcgggggagacctgccctcaaccccacatagagcagggcagacagtacaagatctggggccagaagacccaaaggtaaccatgtttctgcccttcctgaccttgtccttgcttccctcagtgggctgctcagagaactgagagggctgggtgggcatgagcattctcggagagataaaaaagccaccaggggatgggcatggcggctcatgcctggaatcccagcactttgggaggctgagacgggcagatcacttgaggccaggagttcaagactagcctgggtaacatggtgaaaacccatgtctgcaaaaaatagaaaaattagctgggcatggtggcatacacctatagtcccagctttttgggaggctgaggcatgagaatcacttgaatccgagaggcggaagttgcagtgagatgagattgtaccactgcactccagcctgggtgacagagcaagaccttgtctccaaagaaaaggggggtcgggacaggcagcacaggaatgacaggaggcatcattatctcaccctcaggacacgtgtgtatgtatttaatttttaaacttatttttgagatggggtctcactacattgccgtagctgctcttgaactcctgggctcaagcgatcctcccaggtagctgggattataggcatgtgccaccatgcctgggatcccaaggcttttacatctcactccatgattttgaaactaggatgcagttgctgagagggaaactgaggcagggaagcagtagctcacgagtcacccctaacagtagacctcctagccctggttgctgtcagtctggtgcagaggggcatgtgggtaggaattaaatgtgtcatcgccccatgggggatgtcttaggcgggaccccttcctgttcttggctcgggacagtgtgctgggtggcacccactgccagacccctgctcccctagccgcctccagtttttttttttttttttttttttcagatgaagtctcgctctgttgcccgggctggagtgcagtggctcaatctcagatcactgcaacctcaggctcccaggttcaagcgattctcctgcctcagcctcccaagtagctgggaggcgcccgccaccatgcctggctaatttttgtatttttattagagacggagttttgccaggttggccaggctggtttcgaactcctggtctcaggtgatccgcccttctcagcctcccaaagtgctgggatgacaggcgtgagccactgcagctggccctcctggagagtttctgacccgtgagctgtgaccatgaaggggtgtcccacatagccagagctcaggccgggactgcctccactgtacccccctgccacggtcgaaatcctcctcctgttctctgtgtaggcgacgggtgtgtgagcggtgagtcaggagtgggctggaaacctgagagccagggctgtggggcgggagctggtccgcccctcccacgccacagggacagggacctcccgggaggcactgatgttctgaagctgcccggtctgtcccggccctgggcagtggtggtcaccagagctgccctctgtggtttggggctgacctggatcctgcttcctctggtgccatttaaccctccccagccaccctgggttttgcatgcgaggaaagcgaggcccagagagggcatggctgtcagatctgggcccagcaggctctgcctgccccaacaaagcacgacgcacagggactttcgacaacagaaactcggcccccatccttgaggccagacgtcctaaatcaagatgtctgtggggccacgctgcccctggaggccctgggaggagccttcccacctctccggtggtggccggcaccccttggcacccttggcttgtgggtgactgtcccctgcctctgctgccaccactgccgcgtggagcccctgtgtgtttgcacttctctcagcttacaacaaccgggacacatggatggatgcccccgctccagaaccacctcatcttaacttatgatatgtgcagagacactgcgtctaaatgaggccattcacaggtcccaggtcgggacttttaacatgcttttggggggaaacacgattcaatccacaacccccaccagagcatctcagctctcgaatccacaaccccccacagagcatctcaggcctcgaacccacaacccccaccagagcttctcagccctcgaacccacaaccccccagagcatctcagccctcgaacccacaaacccccccaagagcatctcagtcctcgaacccacaaccccctccagagcatctcagtcctcgaacccacaaccccccccagagcatctcagccctcgaacccacaacccccaccagagcatctcagccctccccaggtgtcctggaaggggctccctgtcctcttcctcagatggagctgcctggcttcctgccggagcttaagctgccaccaccctgggtcaggccaccacagcctgcccagaagcgacttcctgttgaatggtgggagccgcctgcaggtcctgagtgcagccgttcctacggggcccacacaggacgcctggggtcaggctcacaggggaccagcacctccctgaggcagcagggaagggcaggaaacttgccccttcctgggccatcatgcaggtggggacgaggcgggaacaggtgcccacccagcccaggcaggggcgcgacgaggccccgctgtacctgctggccgctgccctgacagggtcaccccgcagtcctggggcagggcaggcagggggcgacagtgtggccatggccgtgcagtggtgggttcctggggctgcagcccccctttcctcccctggggctttcctcccctgacctggataccctctgcccctcacaggtctccaccgggaaccttctggtcatcctgagtcgacactaccaggacgtctcctgccttcagttcacaggggacagcagccacttcatctcagggggcaaggactgcctggtgctggtttggagcctctgcaggtagcgccttgcgcactcaggcctgcacctggaactgcacccgggctcaggcggggagaggaggcgccaaggcccctggcgggaaggggcttctctcttgggggctggagtgcagaggacggagtgatcatcccaggggtcctggctgcccacactggggtctggtttgttctgggggccgtgggggcccagccttgagtttactcaggtgaggcaggccaggctgctgagtggaggcaggtgtgtgcgtgaggtgggtgctggaggcgtggactgccctgttccctccgctccccgcctgctgagcacctgccccaccccgctcagcgtgctgcaggccgacccctccaggattccggcgcccaggcacgtctggtctcaccacgcgctccccatcacggacctgcactgcggctttgggggccccctggcccgggtggccacctcctcactggaccagacggtgaaggtacgccgcccccaccccaccacggtccatgagcggagcccagcagccgcaggtcctcagccaggaatgcaggaatcgcctcctcccgctccctgctgtcaggactccagacggcttttaatcccctggtgctctgagcccaaggacgtccagggaggtctgccagcctggaaattcctactcattcaccgtttctggcccggctccctggccaagcctggggaatcggaggtcatcactatgcttgagtcgtgaccggtggtcctgggagggagaaccaggggtcatcagccggagaccaagctccatttcagcacaggccatgtcccctggcccccaagacccacatggtgacggctttcacccaaagtcgcaagccctagggccagaggacagccgacgcctgacctccctggtgcccctgttcccatggggtcctcgggttccccctgccgggccgagccccacgccctttgcccacccgcagctatgggaggtctcctcgggggagctgctgctctccgtcctctttgacgtgtccatcatggcagtgaccatggacctggctgagcaccatatgttctgcgggggcagtgagggctccatcttccaggtcgacctcttcacctgggtgagtgccgcggtctgcgggctgcaccctgccctggggctgagggcatcgggcctgcggctcacacacgtctcggccttcgcagcccggacagagggagaggagcttccacccagagcaggacgccgggaaggtcttcaaagggcacaggtggggacgtgggaacggggcgggggctcccaggcacgtcctgtctggcacgtcccaggtgacccctgtctgtctgtccaggaaccaggtgacttgcctgtcagtgtccactgacggcagcgtgctgctctcaggctcccacgacgagaccgtgcgcctctgggacgtgcagagcaagcagtgcatccggacggtggccctcaaaggtgggcgcgcctctgctcggcccgcggccagcgcgcaggggaaaaagccagcaggagctccgggcttggcttgggtgggggcggggactggtttgctgtggggcggggccgggctgggggcgtggactggctgtggggcggggcctggctgggggagtggactggctgtggggcgtgggctggctttgctgtggggcggggcctggctgggacggggcggggcctggctgggagcgtgaactgggtttgctgtggggtggggcctggctgggggcgtggactggctgggggcgtggactggctgtggggcggggcctggctgggggcgtggactgactgtggggcggggcctggctgggacggggcggggcctggctgggacggggcggggcctggctgggggcgtgaactggctttgctgtggggtggggcctggctgggggcgtggactggtcgtggggcggggcctggctgggggcgtggactggctgtggggcggggactggctgggggcggggactgccctggatggggcggaacttggcttgctgtggggtggggcctggctgggatggggcggggcctgacctccgcgccccccaggcccagtcaccaatgccgccatcctgctggcgcccgtcagcatgctgagctcagacttcaggcccagcctgccgctgccccacttcaacaagcacctgctgggcgccgagcacggggacgagccgcgccacgggggcctcactctgcgcctgggcctccaccagcaggtacggcccccagcagggaacccccactgcccttttgtcccggaagaccccgcgggccctgggctccttcgctcccttggtcctggcgcccgtgcggcggttccccacaagcccggcactggagggcgcgtcctgtgagtgggatggtgatgctcggtggggcctctgcccactctcagtatggacccagaggctctgagaagttaaccacccctcttcccccggccagcagggccgagctgcacgccccacacaccagccttcctgcggctggatatctgacagtcagttaggtctttctgcaaaaggccgatgccccatacttcgggctgtgagagccaaaaggttcacgtctgggctgccgaaggtgcaggagcagccgtgagggcagggagcgggtggggccctggtggctgcaggtggctcccacgtgggctgggggcagcctctcggcctggccacagtcacgccctcactccctgcagctcagcaccgacccccgctctgtgcaggtactagggtgggctcccttaccttctgagggtagagtgacttccggaacacttcccaccccagccccaagaccctcatagaagccagtgtggttggctgggctgggctggggtgggggctgggggttccttgggcctggggaggcttcccagtgtgtttccgcctcactccccgaccttcgatgagctgcctgcgtccttggtgtctcacgtcactgtctgtgtccctcgctgggctctggcgcttggcacttctccccacgcgccctcttcttacctgagtacagattgatttttttatctggagggtgcccgacagcctgatggcctgacaggccctgcaccaggagatgccgttatctcccttgtccgtgcttcctcatggagtgacactctgttttcccacatctaccagtgggcttggggcgggcaggcaggggaccgccaccgtctgggcatccgcaaggcccctcagactgcaaggaggccaggagcacaggctggactgactgctaacagcgtgggcgcaaggaggggcgagctttttgttcagaaagtgccggaactttcggagtgaaaacaggcctccagcggcagagccagctccacgctagggcgcctgcccggccactgcctcctcctagggcagcagcggttcccacgattcctgcccagccaagcgctctccctagaaccccacctagttggccacagtgggattccggagggggccaggccatgcctccggtaatgccgccacctttccctagccgccccacctggctcccttcctcccgtgacggctgctagtcctctgtgacccttgttccaatccagctgacactggaatgttggcctgtcccacagacaggcgctgctggggcccaaggcgcttcgtccaggaggcgggttcccgacctctgatcccccagcaacgtccctccatgtaactggttcctctgtacagggcagtggccttgctgggccggccaggctctccccatggctggaggtgctcactgtctgtgaggccctcgccaggccctgtgtcccagagccttccctgggcttgcgggtccttccaggtctggcccaggcccctgtctgtggtgtggccatctgcacccccatccccagccacatccttgggcgcagtcgtggaggatctgaggcgctgggtaatgactgcatggccagggtcagggttgtcatctgcaggctcgacggaggtgaacgcccccgtctcagtcttcccttctgtctgtgggcgtcacggtggcccctccctggctgagtggctgcccacgctggcgggggtgggatgggcaaagcgtgtggtgtgtgacaggacgcgccccgaggtcacgtggctccctgtgttacagggctcggagcccagctacctggaccgcacggagcagctgcaggccgtcctgtgcagcaccatggagaaggtgggcggggcctcgggaggggcggggcctgaggctggggtcagtcctggccagtgggggtgagtggcccccctccagcacaccccaggccacttctgccctctgaccccgacttctcccgcagagcgtgctcggcggccaggaccagctgcgcgtccgtgtgacggagctggaggacgaggtgcgcaacctgcgcaagatcaatcgggacctgttcgacttctccacgcgcttcatcacgcggccggccaagtgaggcccggagaccccggcccgaggcgcccaggcctgagccccatgcctcccagcaaccagggcccgcgggtgtggcccccaccagcccaggcctggactctcctcagttctgtgtcgtgttcgggtttttcctctgtgactgggccgtcttggtgtctcgtggcacgcgtcacagtggtgctagtctgtttttaacaaaagaggatgaaaagcccctcctctccggcctccttgtgtccgggtgtggcctggtgctgcgtgcaacacagctcccctgctgctcggcccagctgggaccccagccccactcggcaccctctgtccggaggtgggggccttaaccaacctaggcctcgcgggggcggctttaagagggagccccgagcacctgcagttctgactctgctctgttgcccgagggcctttgcatggccgccccctcccgagaaggcgctggaccggggtggtgggattgaggaaggaaccgggaagccaggcccctccggtctgctgtgcagggggtctgagtggagacagccctgtggggtcccggaaggaggtggcttggtgtagagagacgggcctggggacgtttgggggtggacccagccgccagggttgaggggtttccccgggtgcaggacccagctctcagggagggtttcgggggtccctggtccctgtggaaacgcagggctcaggaccaggcaggaggagggagctggtgtgggtggggccttggagcacaggctcctcccagtgcatccctcgggtgccttggggcccctgctggcttccccagggcccagctggagccgcccaagggtgaacccagggtggttctccgggcaaaaggtgccacggcctccccaggcagaggtggcttgccccacccagcaaaggtggccactgcaggctgggaccgtcagatgggtcaggagcaggtctgggggtggtgtcccgatctgagccggtccccagagggagttggacccctgccacaccacaagccgtgcttgtgggtatcaagggcttgagggaggtcaggccctgctgccctggggacgctgccacccagcgcctggatcccagcccagaagcccagaaccttccagaaagctgctcccgactgacagtcctacctaacgatccagaaaatccgtgtgatttagcgggcgtggtaatgaccgcagtccagccagccgccagcgctgagttcatgcttttaggctaatttgtgttcttgtcccctctatggggctctgagtcctctcggctggcagcctggccacactgcatcagggcagctgggccctcacctggcactgacatctgcctcggctgctccgagccctgagaaccactccagggtcccttccccctgggcgcacggccagcttgttccttttccatcatgaaccactcactctgctgacctgcaaggctgggtcctgcctgcggggagcacgcggatttggggtgaggcagctggggggtcccttggggttggctgatctccctgggtctgtacctactgttcccctggagccattcccacgacccctgcccccctccgcatcaccacccaaaggctcccaaatttccctcccagcaccaatcaggacccccaaccaccaactcaagggtatcggcacaaccctgtggctggtgccagggcggggtgagggtgcgcagagccgtagagggacagctgcctggggctcccagggcccggactcggctccagccgctgcaagagcccaaggtgagccaggcacgaacatccaggtcacttcgcagctgcctgcaccacgcggccgtccggggctgaggtcggctgccctctccgcaggctgcagaacagggttagagttcaccgtggggcagggcccgaaaatcgcccggtggcctcagacaggcgacacctggccgggtcggactcgacgttcttgtctccagaaaggggtcgtcccccggcgggtcggctgggagctgggcgggggcggcaggagctcacgcctcattccctgcgtttccctccatgtgcccctgcacgctgggtccttggacacaagccccctcggtgcctctccacgcccgctcccgcaccgtcatcaccctctcggcccagagctcccagacgtgctcaggcaccgcggctccaccctgcgtcgtaattgccggtctgggtgcgatggaaacagtggtgacgtcatcgttcagaccccccgcccccggaggccccacagattctcagagggacggcgccgggactggggaggccaaggcgttgacgagcggggacgccggtgtgcacaggtgacctggcggctggcggggcttgactgtgcagaccacagtgaggtgcgcttgcgggcgccgggacagctgccagcaaagctgagagcagaaaacatcatgcgcgaggaggtggggaagccacagccttcccgtgccctggtgcggacataaaatggggcatccactgtgaaaatagtctggcaggttttttgtttgtttttgtttttgtttttgtttttttgagactgagtctcactctttcccccaggctggagtgcagtggcccggtctccgttcactgcaacttctgcctcccgggttcatgccattcccctgcctcagcctcccaagtagctgggattacaggcgcccaccaccacatcaggctaatttttgtatttttagtagagacggggtttcaccatgttggccaggctggtctcgagctcctgacctcaggtgatccacccgcctcagcctcccaaagtgctgggattacaggcgtgagccactgcacctggccattctgtcaggttcttaaaaaattaaacagcgttaaggttggacccagcgagtccacttctgggtatatacccaagggaatgaggagcagggtttgggaatgaggagcggggtttgggaatgaggagcggggtttgggaatgaggagcggggttttgaaatgatccacacaccaagctcacaacagctccatccccacagccaaaaagtgggggaaggccaggcgccgtggctcacgcctgtcatcccagcactgttggaggccaaggccggtagaccacctgaggtcaggagaccagcccggccaacatggtgaaaccccatctctactaaagatacaaaaattagccaggtgtcgtggcacgtgcctgtaatcccagctacttgggaggcttaaggcagaattgcttgaacctgggcggtggaggttgcagtgagctgagattgcccccctgcactccagcccaggtgacagagcaagactccgtctcaaaaaaaaaaaaaaaaaaaaaagttggggaaaccaggtgtccatcagcggttggatgggtcaccacaacacgagtcctctgcacagtggaatattattcagccttgtaaaagaacgagaaggctcaatgcagtagctcaccctgtattccagcactgtgggagctgaggcaggataatcgcttgagcacaggagtttaagaccagcctgggcaacatctctacaaaaccccatctcttcaaaaaatataaattttagccaggtgtggtgtgcacctgtggtccccgctacttgggaaatcaaggcaggaggatcgcttgagcccaggaggttgaggctgcagtgagctatgatctcactactgcgctccagtctgggcaacagagcgaggtgcagtctcaaaattaaaaaaataaaataagtgaggctcagacacaggccagagcatggttgcaccttgaggacatcacactcagtgagagacgccagacacaaaaggacacgtcctgtctgattccactcctaggaggtccctagagttgtcagattcacagagacggagaggataggaggcgtcagggctggggaggggacggggagtgagtgtcccctggggacagagtttcagtttgggaagatgagaaagttctggacaggagggtggtaagggctacatagcaaggagtgtgcttaatgtgcctgagctgtgcacctagaaatggccaagatggcaggtttcatgttatgactattttcccacaataaaacattttttaaaagtctcctccacgtggccacttgttccacatggcagctgggagtaggaacgcctactgttgcccgtgtacagatggggaaactgaggcagggcacgagggtgagttcccggagggcagacacagtctctgcccctaggaactcttgctcctcagagggagccgaacccagggagggacggggccccagtggtccctgaggacaccaggacccagcacctctcgcagacccagggaggggaccccttgtcctgcccccggggacacctggccagggggctggagggggtggcctgcgggttcctggaaccgagccatccctccctccgtccctccccagtcgtctcaaaatccaatccattttactggctggcacttggcattttattcatttcatggaggatttttttcctacctctccaacgctggctccaaaaggagatgacgtttggggtgtgtgtgtgtgtgtgtgtgtgtgtgtgtgtgtgtgtgagaaaatcgccggagtgtagatccattaattagagctgaatgttcccaacacagcggctgttctgctgccccgcgggatctggggagacaccgtcgggaggacaggatgaggaatgcctgggcagggaggaggtcctctgctagatggatagacggatgcagccgcccccatctatcaggcgcctgtgggatgccagggccccagaaggcaccccccgaggcccagaggacataggcaggcttggggactggtagacagcggggagctatggaaggctctagagcactggaggaggggcatgtgagcaagcatccttgtctgggccgttgctcaagccacaagcaattatagagtgcctactgtgtgccagcaaccaaaccagacccaccccaaccctcccagagctgagttgaagagatggtcactaaataagaaggaaatgaacaaaaagatggtaggccgttatggaaatgtgtggaggttgggggtgggtagcagcaggactgaaatggggcagggagtggtgctttctgcattttctcagtggcaagcagggaacgtttttcagggcagggcatttgggactgggttttgaagggtgaagaggagttctgtggcccaagttgcctgcccactgctggagggcagatctactctataggtttccatcagacatgcctgtctcagtttccccagggtgcactggatgttagaacacacccctgggctggcctggttagaaactgacagctccctggatgtgcgagacaagcaagacccttcctgggcctcaacttccctgcctgagcaatggtcgacattggtggaaggggtcagggatcctggagaggaacggggtgggcgtccgggccaattttattttcttattttattttattttttttgagacggagcatcgctctgtcgcccaggctggagtgcagtggcacgatctcggctcactacaacctccgccttccaggttcaagcgattctcctgcctcagcctcccgagtagctgggattacaggctcccgccaccacgcccggctaatttttgtatttttagtagagacgggctttcaccatgttggccaggctggtctcgaactcctgacttcgtgatctgcccgcctcggcctcccaaagtgctgggatgacaggtgtgaaccaccgcgcccggcaagtcggggccaattttaaagcgcagtcttttcctggcacctccgttccatctgtggcctgaatcagagcagggatgggcagtggttaggcgtccccggcccccgccaggtgtcaccgccgccggcctcaaacaaccactgggaggcactgtttcccccccatcccgccctgggcagggcacgtcccactccccccgcgcggttgctgggaacccggaggccgcccgggcggagcgcggagggcgcgtcggaacctggccggggccctccacccgcgccgtggtcccggtggttgcgccccgtggcgagcgacgccgacaactttgcgatggagtttgtgcgggcgctgtggctgggcctggcgctggcgctggggccggggtccgcggggggccaccctcagccgtgcggcgtcctggcgcgcctcgggggctccgtgcgcctgggcgccctcctgccccgcgcgcctctcgcccgcgcccgcgcccgcgccgccctggcccgggccgccctggcgccgcggctgccgcacaacctgagcttggagctggtggtcgccgcgccccccgcccgcgaccccgcctcgctgacccgcggcctgtgccaggcgctggtgcctccgggcgtggcggccctgctcgcctttcccgaggctcggcccgagctgctgcagctgcacttcctggcggcggccaccgagacccccgtgctcagcctgctgcggcgggaggcgcgcgcgcccctcggagccccggtacgcgggacgcccggagtcaggacgagggggacccggggcgggagcggggtcgggagccctggggacgtccggagtcaggatgggggtgccgggactacgcagggaagggggatcccgggacgctggacgggccccagggatcagggatggggaagacccgggtgtccccggagcaaggaaaccagaacccagaggaagagacccaggggcagggacctagacgcggggttgagagctccagggacgcccctggaacgcccctgcagaccccttcccagcgccctggtgatggggaccccgccactgtggcctctgccccttccttgcccaggccccttccctccttccccacagacccttccctggtccctgggacctcctggtccccacccggctctgggtggctgggctggaggacaggcggtctccctcctcactctaggggtgcagtttcggggtctgcaggtctggatctccctccttccagcattctccccgtcccctcccagaggcctccaagatcccagagcagcctccatcattccaaccccgactccattcccaccccccaacccctggcagccttcaagttcctctcttctaaccccaccccaggcccagatcccgggaggaaacggaagaagagaagggcgattgactgggttctggggtccctgttgtcccccccaacagggctcactgcgccccagataacaagccccctcccgtggccagcaaggaggtcccaactccggacatgggcctggctgagctctatgccccagctgcccctccttcccaacccactcagaggcccctccagcccctccctctcctcagggagggagaccctgacgctagagggggggtctcttagcccagctctccaggtgtcaaggggacccctgtccccccaccgccctagggctggtgggagaggcggggcccaaacccaggcctggggcgccctctgctgccgtctccaggagctgcaccgccgcaagccggggcgtgggaccgacctagcgtcttagggactggcttggccccctggggactgagccccatcccaagcccatcctccagcactgggcaccctgcttccaccctgggaagcgccctgccaacccgaggggcctggcaaagctctcccacctttaatatactaagttaaatccagggccgggtgcggtggctcacgcctggaatcccagcactgtgggagcccaaggtgggaggacagcttgagctcaggagtttgagaccagcctgggcaatatggcgagaccccatctctacaaaaaatacaaaaattaactgggcgtggtggtgggtgcttgtaatcccagctactcaggatatatatatattggctgggcactgtggctcacgcctgtaatccctgcagtttgggaggccgaggcgggcggatcacgaggtcaggagatcgagaccatcctggctaacatggtgaaaccccgtctttactaaaaatacaaaaaaaaaaaaaaaaaaaaaagctgggagtggtggagcttgcagtgagctgagatcacgccattgcactccagcctgggagacagagcaagactccatctcaaaaaaaaaaaaaaaaaaatccaggagaactttctggatggcactgggcacaagggggcccctcagccctccatgtgcctggcacggggcagtaatgtgtgaaggggatgctaggggaagctacctggtttggctctaagcacaaggccatcggtgggctcacctttatgagccacagctcttggccctagaggggttcccaggcaggtgggtgccaggtgaggtcaggactgtaaaggaatcagggagggacctgaggctggaggcgttccaagctggagcctgggctctgcctggaggatggagaagtctgaatagaggaggagcaatgtgcttgggttttgaaggatgtgtaggagttggtgggcatagagagagaaagatattccatccggggaatggcacatgcaaaaaaaaaacaaaaaacaccaagtgtgcccatgacaagggtagctggagccaagagaggctgggagactgagctttgtggggatggtgatggggaacgatggaagggtttagagcagggctggggctggggggaggtggaggggaggtgcagccatccagctggcatctacttgcggatcacccgctgctggggtgggaagggttttgtgggggtggaggtcgtcaaccctaaccgtggccacccctctcccagaacccattccacctgcagctgcactgggccagccccctggagacgctgctggatgtgctggtggcggtgctgcaggcgcacgcctgggaagacgtcggcctggccctgtgccgcactcaggaccccggcggcctggtggccctctggacaagccgggctggccggcccccacagctggtcctggacctaagccggcgggacacgggagatgcaggactgcgggcacgcctggccccgatggcggcgccagtggggggtgaagcaccggtacccgcggcggtcctcctcggctgtgacatcgcccgtgcccgtcgggtgctggaggccgtacctcccggcccccactggctgttggggacaccactgccgcccaaggccctgcccaccgcggggctgccaccagggctgctggcgctgggcgaggtggcacgacccccgctggaggccgccatccatgacattgtgcaactggtggcccgggcgctgggcagtgcggcccaggtgcagccgaagcgagccctcctccccgccccggtcaactgcggggacctgcagccggccgggcccgagtccccggggcgcttcttggcacggtgagtggggaccctgcttcccttaggagggtgtccaggccactgagtctgcactgctcatggatcacaaaaggcaacgtgaggccagacgcggtggctcacgcctgtaatcccagcacttcggaaggccgaggcgagcggatcacttgagctcgggagtttgagaccagcccggccaacatggtgaaaccccatctctaccaaaaaatagaaaacattagctgggcgtggtgacacgcacctgtagttccagctactcaggaggctgagatgagagaatcgcttgagcctgtgaggtccaggctgctgtgagctgagatcgcaccactgcactccagcctgggcaacagggaccctgtctcaaacacacaaagtcaggatgctttgttagatgtcttaggtccccggaagcagtgcccacctggggaactatctcagggacagcagagaacgagctgaacaactaggagggagggaacgggtctctggctgagccctggaggagttcctgagaatgaacaactcctggaaacaggtgaccccagctgggtgcttgtgtgtcagtcactggcttcaggcgtatgtggagtgggggcacagccacggcatcgggcacggatgccccgggatcaaggggttaggcttggggactaggcttggggacaccaggagcgtccacgtttgtcctcatgatacggacaagagcgaccagtgggaatcgggcacgtgctgggcaggggtgagaggatggaggggtgtgaacttcgacacctgacaccccccccgccctgcccctaggttcctggccaacacgtccttccagggccgcacgggccccgtgtgggtgacaggcagctcccaggtacacatgtctcggcactttaaggtgtggagccttcgccgggacccacggggcgccccggcctgggccacggtgggcagctggcgggacggccagctggacttggaaccgggaggtgcctctgcacggcccccgcccccacagggtgcccaggtctggcccaagctgcgtgtggtaacgctgttggaacacccatttgtgtttgcccgtgatccagacgaagacgggcagtgcccagcggggcagctgtgcctggaccctggcaccaacgactcggccaccctggacgcactgttcgccgcgctggccaacggctcagcgccccgtgccctgcgcaagtgctgctacggctactgcattgacctgctggagcggctggcggaggacacgcccttcgacttcgagctgtacctcgtgggtgacggcaagtacggcgccctgcgggacggccgctggaccggcctggtcggggacctgctggccggccgggcccacatggcggtcaccagcttcagtatcaactccgcccgctcacaggtggtggacttcaccagccccttcttctccaccagcctgggcatcatggtgcgggcacgggacacggcctcacccatcggtgcctttatgtggcccctgcactggtccacgtggctgggcgtctttgcggccctgcacctcaccgcgctcttcctcaccgtgtacgagtggcgtagcccctacggcctcacgccacgtggccgcaaccgcagcaccgtcttctcctactcctcagccctcaacctgtgctacgccatcctcttcagacgcaccgtgtccagcaagacgcccaagtgccccacgggccgcctgctcatgaacctctgggccatcttctgcctgctggtgctgtccagctacacggccaacctggctgccgtcatggtcggggacaagaccttcgaggagctgtcggggatccacgaccccaaggtgggcggcctcggggggctgcgggtggccttggggggctagcggtggccccgggctgggctgtgtggggcaggggtggtcagctggacgtggaggacgtccactaggccaactctggtcccaagagacatttattcaattaatttatttatttaaagaaaaatagccgggcgcggtggctcacgcctgtaatcccagcactttgggagaccaaggcaggcagatcacctgaagtcaggagtctcgaactggagcctggccaacatggtgaaaccccatctttactaaaaaatacaaagaattagctgagcatggtggtgggcacctgtaatcccagctactcgggaggctgaggcaggagaatcacttgaacccaggaggcggaggttgcagtgaatcaagatggcaccattgcactctagcctgggcaacagagcaagactccgtctcaaaaaacaaaaaacaaaacaaaaaacacagagatggggggctggctatgttgttcaggctggtctcaaacgccggggctcaagcagttctcccaccttggcctcccaaagtgctgggattacaggcgtgagccaccgcatccagcctatttttcttttcttttttgagacagtcttgctccatcgcccaggctggagcgcagtggcacgatcttggctcactgcaacctctgcctcctgggctcaagcgattctcctgcctcagcctcccaagtagctgggattacaggtgtgcaccaccaagcctggcttttgtattttcagtagagttggcgggtttcaccatgttggccaggctggtctcgaacccctgacctcgtgatccgcccacctcggcctcccaagtgctgggatcacaggtgtgagccaccacatctggcccgtattattattatttttttttgagacagagtctcactcttgcccagagctggagtgcagtgatctcagctcaccgcaacctccacctcccaggttcaagcaattctcctgcctcagcctcccacagtgctgggattagacgtgagccatcgtgcccggcctccccttgtaatttcttggcaaagtcgggttttctgccccgtagtgtctctgaacttttggatctgcccagtggtgtcccctgggggtgcctggcctgctccccagcccctggtgtcccctgtgaaacggtagtaaagcgtagacgccatgctgtcaggtgagccgactgctgccggcggctcttccaatgtaaacgctgcacagctgagccgtcaaagccttttcatcatacggaaacttccatcagatgctgctgacccacaggcacgatgggattcaagtttgggtttttggtggtgctggaatcccgtggggaggccgtggctggtgtgacctcagcagccagacccacctactcattaggggtctgcaccaggttgccctggcagctgtggggagaacagaccacgggtggtgcagggaggaccccgcagaggggcctgggctggtcgaggatgttgatggggaaggaggctgggttcgacgctgggccccaacctgggtaggagctgtggaggggtgagcagtgggcagttccctgtgttgcaggtggcgccccccagggttttcgggagaaacagggtgtcagaggcagtgacgacagagctgcctccgcctggggtgggaagagcgagtgggggcagatcaggagtggggtcatggacatgttagagtggggctcccgtgggacccccaggggagaggcagaggaggtggtgggataggcgtccagcccagggcgaggtccaggtggagatggacttgccggcgtttagaacagagggtctccacccggggtgatcctgccccccgccccaggggaccctggacagtgtgtgtctagagacagctgtggtggtcacgcctggggtgtgctctgggcatggagtgggtggaggccaggaatgcagcctcggcgccctgcagtgcccaggacggccccaccccggagaacggcgcgcccctcaatggtcaggggtcctgaggggcaggcagaggcgctgacggggtcccccgcgcagctgcaccacccggcgcagggcttccgcttcggcaccgtgtgggagagcagcgccgaggcgtacatcaagaagagcttccccgacatgcacgcacacatgcggcgccacagcgcgcccaccacgccccgcggcgtcgccatgctcacgtgagcccgggcgcggggtgaggcgggggcggggcgtggggtgggcggggcgatggctgacccccgcccccggccccagcaggagcgacccccccaagctcaacgccttcatcatggacaagtcgctcctggactacgaggtctccatcgacgccgactgcaaactgctgaccgtgggaaagcccttcgccattgagggtgagaggcacctgggcgaggcggggcgccggggtctctggggacctcctgggggcagtggggagccacggagggttcgaggtgggaaggggcgaaatcccacgtgtgcgggcagagttcccctggggctgtcccacctggccccaccgcctggccccgcgcccccaggctatgggatcggactgccccagaactcgccgctcacctccaacctgtccgagttcatcagccgctacaagtcctccggcttcatcgacctgctccacgacaagtggtacaagatggtgccttgcggcaagcgggtctttgcggttacagaggtggggcagggcctgggacagagggtgggggtgggggtgggcgtggggggccctgagccttgtctgaagtgaccaaccccagtgctcattccccagacgtgcgtttgtctgcttctgcgcacttctattcaccctacaaaaccccggctgcagtgccccttcctccatgaaacctcactccccccagccatggagtccctgcctcccaacctggctccactgccccaagcccctctctctggcccaacctgttctcccctagttcaaggctccccaggggcctgccattacgtgaccgtgcggggctcctgctgtgttgcccccagaccctgcagatgagcatctaccacttcgcgggcctcttcgtgttgctgtgcctgggcctgggcagcgctctgctcagctcgctgggcgagcacgccttcttccgcctggcgctgccgcgcatccgcaaggggagcaggctgcagtactggctgcacaccagccaggtggggagcgggtgggcggcgggcggccccaccccccccgcctcctcgccaaccgggtctgtctggggtcttagaaaatccaccgcgccctcaacacggagccaccagaggggtcgaaggaggagacggcagaggcggagcccaggtaagtggtggtcggggcggaccacgatgcaggaccacccagacccaccaccccaccagctcgccccgaagccggccgcggggtgcaggaggttcccggaggtcccccgcccacccccggacgtgcacaccgtggctccctggttgtgcctgtcggccatcctctgccgtcagcggcctctgcagaggcccagggcgcgagacggctgccccggcggacactgaccaggccggttccgtccccagcggccccgaggtggagcagcagcagcagcagcaggaccagccaacggctccggagggctggaaacgggcgcgccgggccgtggacaaggagcgccgcgtgcgcttcctgctggagcccgccgtggttgtggcacccgaagcggacgcggaggcggaggctgcgccgcgagagggccccgtctggctgtgctcctacggccgcccgcccgccgcaaggcccacgggggccccccagcccggggagctgcaggagctggagcgccgcatcgaagtcgcgcgtgagcggctccgccaggccctggtgcggcgcggccagctcctggcacagctcggggacagcgcacgtcaccggcctcggcgcttgcttcaggccagagcggcccccgcggaggccccaccacactctggccgaccggggagccaggaatgaggcggcagccgggccgtttgggctcaagacacacacacagcgcagtgagccgctgtcaacagacagtttattctatatacaaacacaattttgtacactgcaattaaatagaatggaatgagcgctcctccgcattcctccccgagtgactggtttggccgccggcccactccatccccgagtgggactggaccacggccctggctgctgccactgatgttggcgcctgcaccccacgtccctatgcccgaggcgcaagctctgctctcccggggaccccaagcctggcgcacacgcggggagggcggggccatggagaaggcactgcagggagcaccaggcagagccgggctgaggccggccggcactagggcgcgaggccccaccccaagccggcctctcctccacacctccgccttgctcagagacctgcaccatgggaccccactccatcctcaggacggttcactgcagacctaccaagacccctccagaaccttccgcggaaccccaccccctctccttgctgaccagctcaaacacctcactagcgggtacaagcctcgggcgcgacctcacaccagggggaggaaagccgccttccgggcaaaccccacgaaaccctgaaagcccccgacacaggctgggcagtcccagaggaaggaggtggctggcctcccccacccccacgggctcgggaaggtcaggcccagccagcaggggtcagaggcggctcagctgtgcggctcaggaccccacctccgagggcgcctccgttggggccatggaggccgggctaggcccgcctaccgcagcccccaggggagttgtgtcagaagctgcggagtcactcggggggacactgtcctggggggcgtgggggaggcccccagcagggcccagcgggctggctggacgccgctccaggagggaggcgctcaggccggacaggaaggaggcgtctgtgatgatggcagcggtctctgccatccaacccaggtcaccaccggcagctgctgccactgaggctgccgcggccaccagggagctgggcgccgctgccacaggcccgggactcccgctggccccaggcgagacggggcccagggcggggggctggccggcagagtcaggggctgtagccggggcgcccgagttgttgttcatgtcatcgggcagcgccgtgggggtcccggggcccagtggcggcgcctgaagcagcatctcctggatgcggacctgctgcaggatggcaggcagctcgtagtggtggaagaagtagatcatggaatgctgcgggagggagagtgggagtcaggacgggcccgcccctgccccacccagccgctgctcccagagggcagcccacccgggaccatccacgctacctctgcccgcttgggccgaccccacagggcatcctccccggctgcagcctctcctgcctggaaaggcacggctggcctgccccctgcttgccgcccaggcctcacctggatgaagagccaggaggtgaccagggccaggctgctatactgcccattgaagcggtagtgataggcatagaaggcgaagtggtagagatagaagaacctgcggggcggggtgagggcgtcggggctgcaggtcccaccctgccaggcccagcccctggggttcccgcgtggcgcagccaccacccccgcctccagcgcccctccctctggcagccccctacccctgcccaccagcacccactccaccctgcccccgcgccacgctcaccgcagccaatgccgcttgctggtgctggtgtggcagcagatggcgtcatactggtccgcgagccacacgatgaggatgatgtagaaggcggtggtggtgtcgttgaagaactccgacatgatggcctccatccctgcagggagaggcggcgccggttgaagcgggcggggcggggtgcagcgcggggcgggggaggccgggtggggtcctcaccgacgagggccaggatgacggtcagcaggggcgctgcggggaaggcgatggccatgttcatctccagcatctgcagcaggtccactgcgggcacagggcggcgggcgcccggtgagggcctggaggacgcccgccccgccctgcgccggcgggacactcaccgatgaagacgaagatctggtggtgtgagtaccgcagcagcatggacacgctcagcgtctgcaaggggcgcgcaggaagcgctatgaggggctgcgagggcctgcttggctcccgcccggccagcccccgcacccgccccgaggcactcacgaagatgaccatgatggcgaaggcggccaggtaggacgtccgcgccatccacatgctcacaaagcggtagtgctcgcccgacaccacattccgcaggaagcctgcagcagaaggagccgtgagcgcccgcccccacccgcgccctcgcaccctcggccccggggcatgcctcacccttgttctcctcgttctcggccaggcccttcacgctggacatgaggatgtcatcgtagcccaggaactcatccagcagcaggcggctgaagcggtccccgaagcactggtcccgcgtggggtctgcgggtgggtgaatcagggagccgggagccccgcccaggccaccccctgggccctgccccagctggctccattgctgaggcctggcctgcttcctggccctgcccattcttaggaaacccatccaggaccccagccctgggaagcgtgcctggggcggggcagaccccagtgcttcctgcacagccccccgtcccgcaccagcaggaggagacccgagggaggaggggaggccccgccatggagctccccaagcccagcagctcagactcacccagggtgaccaccatgacggggatgctcaggcgctggcgggtggcctgcgacaggcgaaggaagccatactctagtgagtactccacgatgtactcgtcctgcggccacactgcagggcagaaccagggaccaggtcagcgcccccacacacgtcccccgcccactgccagcaggcaaggcaggcgttgaggggtggagggtgagacctgctgagccctgggccccaggtgggtgctgggaggacccctacatggacacttgggatggtgcccactcaagctggtgtcctgccctgtgcactgcagaggctggccaggctcctcctcccgtggccccctctccctggctggggctggctgggtgcagggctgccccactgccctggcggcccccagcacacccccaacacttcagaggccccggccctctggatagaccctctgctgccagatgggcaggggtgggggcgggggcgggggcttccctgagcacagcccgctagaactctgagctcagagccgaagggatccatcccctccaagtcgccgttcacgaggatcccagaaaggatgagctgagccagttaccccaggctctggggtgtccccacagcctcctgtgctgacagatggggaaatcgaggcacgggggtgccctcaacggtccaggacatgcagccagcaggctggggatgttcggagggaccccgcctgcaccccagcaccccatgactgaggcaaccccgtgaggcagtacacctttggtgggtggcctacctttggtgggcgtctcggggaaggggaactcctggctgtcattcagggcctctgtgctactcggcggcttgaacaccttgggctcgatgtccagctcaaactgtgggcgaccagggacctgggtgtcagcagcgccagcccgggctgtgagggcccagcctgaggatacagtcctgctaatgggaagggactggaagcctcagcctctgccccaccactgaccaggccagggtggactacgtgtgcctcccgcctcagctgggaccccacctcaacaccaagcctgccctgctgtgaggccatctccagcacagctctgaatcctgaagctgaggcaagggccagctacaggcagtagaccccatggaagggtccatgatgctctgcccaaacactcaaactcttggggttggctctgtgggaacaggtgggaccccaaaccctgactgctgaagcaaaaacatctcccaccaggctgtggggcccaacacagccacctggtcccaccagtgcccaaggccaccacaagctgaccgggaacccagcacctctgcaggcagtggggccacctcaggacggccaggatgggcccagagctcttagctttcagcccccaggcctcctcagctattgctgcccactgcatccccagccccagccaatcccctccccggaacagctactctcaaaggcccgagtctgcccagcccaagtcctccccgagatccccctgccctgcccaggcctctagcagggcgacaggccgagggtcttgcttcagagcccccaggccaccaaaaggccacggcaggcaggggcggccttgtctgcatgccaggtccctgaaagtcaagaaccccaacatcctgtcgatgtcaggaaccgccccttcagcgaccagcatctacggggcgctggcctctgctgcagctgagcccaggcctggctcaccttgatggagctgttcccaaacatctccatggtcagctcttcctcctcctcatcttccatgtccaggttgctgcctggttccacggccaggcccgggaagctcccgcggccgccgctgtcacagaactgtaggaagacgggcgcgcggctcgagttgtgccgcacttccacacgcaggatgccctcacgcggccacttgtcacgcacatgctccaggcagttgatgggcgagcgggagaagacgatgtggatgtaggccaggacgaagagcacaaacagggcctagggggcggccggcagtcagtggggcgccccagggccagctgcagccgacacccaagggcctacgtgatggggcgtgatggggcgcgctgggacgcccaggacggggaaaggaaggaaaccccagaagccgaattgggctctgaggaccctgggtccctcccacgctgactgcaccgggccagcccctcacatagtccaagtgactgaggatccgggggacgccccactccaaccccggaggggctctgccacctgcagcccggctctgacaggccctggggcttcggcaaggcctgtgactgccccgcacctcctcaggggtgagccggacgaagccagcaggccggggccctctcagatgcacacaggaccccccaaacctgggaggagacgaggctggactcagacccaccaagtggagcacaccagggccctctgccagccaacggctcccgccctgcaagcagcagcatgggtgttgccgccaccccagggccaccagctggacccactgtctacgaaagagggcacagccctccacagcccaacctgctgcttcctgcctcaccttccgctgcgtccccagcactcccctgatctcaccacctgaaaatagcttctctcacctggcggggcgccctgtgcaaccctcccaggcctggcggggccagccgcagctgctggggacacagtggacctccgtggctgggcagagcgccccacggcagggcgaggctgccgtgcccgaggcacaacctatgaactggggtgccagcagctctcacctgggggctcctgcccaggggatgcttgggacatctgtggttgtcacaattgggggagctcctggcatggagtgggtgaggccagggatgctgctcggcaccccgcagtgcccaggacggccccaccccgacgtccacagggcttggggagcccacgccccagcgtgctgcaggcacaactcagagtggggcccctctaggggcagttcagggcagcccctcttccagggagcccgcctcaccgtctggcggtttggctgcccactgtacctcccaacctgaggtccaggcatcacccccgagcctggtgagggtcacgtctacctgctgccccgatccgcaaaactgaggacccagctgggccaagggggcgcccacggccacatggaaccccagactctcagggaagaattgatcagactcaaaatcacaagccagagagcctggagcacagggcccctccgtgacccgtgacctgctggcaggtgcaccaatgcccggggtgcagtgagccacctgtggccgcacagccataggcaagaccaccaggagcctcaactcttccacgcccacagtgagctggggcctcctctccagaaccctctgtagactgagcaaagggccgagtcagcaaagcaacccacttccagcccggccgcagtgctgtgacctgtgggaggccctgagtctgagcacggataaagccctgggtctagccgcacgtgcacctggggcgagccccatcacactccccagccccaggagctggagaatcccttgggctgatctgaactgcatttctagtccttacagccaaaagagccgcaggggatgaaggctggcccggcgctgagatttaagcagaaacaggcaagagcagaaccctgaccgccaggcattcaggccccgcccacagacgccggagctacaaatgaggggtgggcggggggagggggcagggccctctgctggggagggttcccctgtgtcctggggaagacagggagggcagtgtggaaggggggcagccccggagcctgagatgctttcaaagcctagcgtttccccatatggcatctggggacaggagccacggaggctgggcccagtggtgggtcacggtcagagacactgaccccacagcccctcggctcagcactctcaggagagaggggcccgcgaggcccatggtggatgctgctggtggccacgctctgccttccaggcccacacatccagcaggagctgtgcccaggacagcaatggaccctgtgccaagatgttccaaaaagtgctgatacacagtgggccgaggtcggggctgtccaacgcttcacaagggacgcacggctgttaccatccctggtttatatacgaggaactgacacagaggtcccgacagacctggacctgctgaggtcacatggccaggagggaggggccagggcagtgccagtctgcacaattaaggccccacggggaagagcagctcctggggttgccctgggcagggtcagcttggtccagggtcagcgggagagggcacaggacacacatcctgccacacccagcactggtgtgagtgacccgtcccatgaagacagcggacgtgatgagagggcaccagtgttttcacacaatgtgcacacactccagtcaaagacttcaagtccaccagacgctatgactcagacgtcactgtgtctctgccccatcaggtgctccgtgctgaccgagctcagggcccctcttccctgactgagcatgaccagaaaaatgccccactggacaaggcccgttgccgccaaagcctcagctccccttcagtctcccaccacaaaacaaggagcaggcaccacccagccagacgcaggctcatcccgagtcccgggtcctcctccccaagacctgtctgtcatcagccaccctgcagcagccacctcaccaggcccggccctgagccacacgcccaggcagcctcgtccacgcccacagtaaccctccccagggagctcacctgcaaatgctcccatgggcccctggccaccctctgcccgcaacctggctcagccactcgcatgccctgggtggtccagtcccctacactccatgaccctgtccctgacccaggctccccagcaggcacccacatgctccagccccacggccttcccacacgctctccagctgcctggacaccccaccccatcccactggctgtggctcacctccaggaggccctgcccacccagcacaggagtcaccccacccctatgacccttccttcctccgggtcagcccacacacggctgcacccacaggagcacctcccccagcctggggccgtgctcaccgcctcctccaggaagcttcctggatgttctggccgaggctctcagggcaccccaacactcggccactgggtgggcctttcctttcctgtctccccacagacctggagtgccaggagcagcctgcccgctctctgggtatttgactgacccacagaccgacggacacacaagcccgcggagccacactctcctcccaggtgggacacagagccctcagccccagccaggaaacactacctggggctcccctttgtccacccggggtgcttcctgcctccaggccaccggggcctctccttccactgcagcctcacagtggcctcaatgtgacaggtcccccattcagagcagggcccctggggtctcacataccccgtctttaatcgtcacgaccccacaagaggagccccattactccctgtggctaggcgcgggcccctgcccatgtccaggggtgctgagtcgagaccccttcaccctgtgggcatccacttggtggtcacctgggtccagagcccaaccgcacaggtgcaggcacccagtgccccaagatggacagtctctgccacactgggctcagggccatgaaggccagcagaggtggatactgaggctggatggaggtctcccgagggcccctggaacacaggcccctgccgcctcctctctccccagcacctggcactgcctggcatttcctaaagccacccaggcatggatgagggaccggggggctccatgctggctcagagctgggagatcctggcatttcctaaagccacccaggcatgggtgagagctgggggactccatgccagctcagggctgggagctcagctgcacagatgccacaggatgaagccaccttgaagggatcataccagggaggacctggctctctgcagggagacccccggaagccaggcaggcaggaagcagaggagccttctggaactcaaggcagcctctgaaatcaggcagttccagcctgcactttgcagataagtaaaagtgaaggcagcagggtcagattctgtgccaccagattaccgggtggaaaattcacaaagaacagatttccccacccaggccaggcatggtggctcacgcctgtaatcccagccttttgggaggccgaggcgggcagatcacctgaaatcagcagtttgagaccagcctagccaacatggcaaaacccagtctctactaaaaagacaaaaaaattagccggttgtgatggtgggcaccggtaatcctagctactccgcaggctgaggcagaagaattgcttgaacccaggaggtggagtttgcagtgagccgagatcaaaccactgcactccagcctgggtgacagagcaagactccatctcaaaaaaaaaaaaaaaaaaattcaccacccagagatctcacagtccaaagccctctgctgagagaggagggattggggttactgagaacctcccaagagtctccaccctacacagaagacggggaactccagctctggcccagccccatctgaccacctgtgagtggtattggcctggagatggagccgggtaggcttgatccctttccaaaccgggacatggtgggaccagggcccaggcgacagggatgcacctcccaaggaggctgagctccgtcgggggaacctggcctggcacccagcacacaccctccacaagcctaaggacacagtggctccatcctgttcccaggctactccatggaaggaaaacccacgtccacagaccagcctccgtccacagtttcaggccccgtctgtggaccccagagccgggaaaggccgcctgcctgcgtaacccttcacagccctgctcaggtgcctactgaggcgaccatgccactctggggggctgcagggaggaaggtgggaaggatgatgggctgagctctggcctggggaggcacggatctggaggctggggggccttccgtgaagtggcagcaggctgggacccacacccaggtccgcaggacggccaaggtccagctccacttgccgagcccaaaaaagcagccagctcctgaccaacctgtgtcaggctgggaacttgcccacgatcgcagcctggcccgccagcatcggacccctctttgcaggctagatccaaaaagctcacggcgcaacttcagcagcccccaagccccggcgcggcggtgttctgatgcagaacgaaaacggccacgtccccatttcgccaggtggcccaggaccccggccagcttgttttctgaggggctgcagctgctactgagcccctcttgtcacccaagcaagactccttctcagagggagtcaggccgatgcctgtcctgcacggctgagacctctgccatctgaggagggcgggagggggacagagcccaagacgcggaggccggtgcctcataggggaggcacgggcgacagacccacaacctgagctcctgaagcaggaagggagtggggacccagcggaggaagaggccggggatggggtggtacgctgctgccggtgactttgccgctaaccctagcgaggtgacctcagctaagtcacattcccctgaggctcaggagcggggaacgcagctgaaaggctacaaggagggagagaggggagtggggagtcgacttccaggacaggggttggtccgagggagacctgcgtcaggctgggttctgggccagcacattgggaggggagagaggcctcggaactgagggtctcaggcggcacagtcaggggtcaaagggcgggaggtgctacctcgcaggccaggaccggactccaagcctgggtaggtggggacctgggaaaggcggtcgccggggacaggatgggccctggagggagctgacagtgaggtttccagagtagagaacagcggcttctagtgcagcgggatccggccttcccgggtggacgtccccgggcgggatggggtcacgagacggtgtccctggccaatcccagggtcagaggtcgcgagggagagccctaatcggtagggccgggtataggcctcagggtgcagggtggcgctcgctgtccccagcggggccaggggtcgcggtcggaggtagcagacttgggggtcgggacagccgctggggtcaagggtcgggggtcggggccgcggtcaccttgagcagcacgaagaactcgaagagacggcggaaggcgggcgggaagagccgcgaataggtgacagccatcttgaagaacagcgcgtggaagagccggtcgcgcacgttgatgagggggttggggttgagattgggggtgcgaggcccgcgcgcgggggccgggccgccgccgccgccgttgggcccgggccccggagctgcgggctccacgtgctccgacatgcctcccagcgtcgcgccctaacgacccgcaagtgtccgagggcgcctcccggccgccatcggccgccctcgcagccgccgctctcctcacggcctcccggccgccgccgccatcttccgctttctcgtccggctgcggcgctgctgacgctagcgagtcgccacgccgggcaagagcggcccccctgcgcccgcagagaacgctgggatgccagcggcgcccgcggaggcctcaccccctacctcggccgctccagggggcgggcctgcatctgggccacctcttttgcatattggcacccacaatccaccgcggctatgaggccagtataaggcggtaaaattacgataagatatgggattttacgtgatcgaagacatcaaagtaagcgtaagcacgaaagttgttctgcaacataccactgtaggaaattatgctaaatatgaaaccgaccataagttatcctaaccaaaagatgatttgattgaagggcttaaaataggtgtgacagtaacccttgagtcgtgctcgcttcggcagcacatatactaaaattggaacgatacagagaagattagcatggcccctgcgcaaggatgacacgcaaattcgtgaagcgttccatatttttgctgtagtctacagctcgtcacctcgtttggcttctcttgcccggatcctgccatgacgtcacagggccagtaacgtcatagtcttcccgtgtccatctcctgtggcgccactaaggttggcggtagaacaatctggcagtctctactcctgcgtggcgctgtgccacctgcccccgtagcttcgcgcagcaatgaataaataagtgctcttcaggggcacttactgagtgccggctgcgtacacaagaggatactatggtttttgggttttttggttgtttgtttgagatggattctcgctctgtcgcccaggctggagcgcagaagcgcgatctcggctctctgcaacccccgcctcccgggttcaagccattctcctgcctcagcctcccaagtagctgggattacaggcatgcgccaccactccaggctaattttatatttttagtagagacggtttctccatgttggtcaggctggtctcgaactcctaactttaggtgatttgcccgcctaggcctcccaaagtgctgggattacaggtgtgacccaccaagcccgccaaaaaaaagttttgtgttgttttttttttttgagacgcagtctcactctgtcgcccaggctggagtgcagtggcgtgatctcggctcactgcaacctccgcctcttgggttcaagcaattctctgcctcagcctcctgaatagctgggattgcaggcttccgccaccacacccggctattttttttgtatttttagtggagaccaggtttgatcatcttggccaggttggtattgaactcctgacctcgtgatccacccgcgtcagcctcccaaagtgctggagttacaggcatgagccaccgcgcccggcccccccaaaaaaatgtttttaaaagttaactgaggacgttggtgcatgcctgtaattccagctacttgggaggctgaggtgggaggactgcttgagcccaggagttggaggctgcagtgagccatgatcgtatccctgcgctccaggttggatgactaagtgagaccctgtctctaaaaaataaagtgtaaaaaagccaacagtcagtatttttagcttttttgggtagagtaactactccactctgctgttgtacagaaaacgcagccgtaaatgatacataaatggatgggcacagctgtgtgccaataaagctttgtctgcagacactggaatttgaatgttatgtaatttccacgtttgatagaatggttttcatattttgggtttttttttcaaccacttaaaaatgtaagagccattcttagctcacaagccatacaaaaataggctgcagctggatttggcccacaggtcaagaacacagctttccaagagaaagataagcaaataacaaacataactttaagtgttctggtagccacagtaaaacaactaaaaaagagcaagtgaaattaattttaataatatattttacacatctcaagttatccaaacaaggtcaggcgcggtggctcatgcctgtaatctcagcacttttggaggctgaggcgggaggatcatttcagcccaggtgttcaagaccagcctgggcaatataatgagatcctgtctctacgaaaaataccaaaaattagctgggcacggtggtgtgtgcctgtggtcccagctacttgggaggctgaggcaagaggattgcttaagccaaggagttggaggctgcagtgagctgtgatggcaccattgcactccagcctgggcaacagagcaagaccccacctcataaacgaaaaaaaagtggccgggcgcggtggctgacacctgtaatcccagcacttgggaggccgaggcgggcggatcacgaggtcaggagatcgagaccaccctggcaaacacggtgaaaccctgtctctactaaaaatacaaaaatattagctgggtgtggtggcgggcgcctgtagtcccagctgctcgggaggctgaggcagaagaatggcctgaacccgggaggcggagcttgcagtgagccgagatcacgccactgcaccccagcctgggtgacagagcgagactacttctcaaaaaaaaaaaaaaaaaaaaagtaactgagatgtaccaagtcttcagaatctggtgtgtttcccatccatggggtgttccaatatggataccagtgcttcctcagaaatacttatctccacagtatttagatttacagcgtttatactgaaaaggaaaattcagaaacgctaaggtatttaaaatatacacgaggctgagcacggtggctcacgcctgcaatcccagcactttgggaggctgaggcgggaggatcacttgaatccagactgggcaacatagggagaccccatctctacaaaaaatttaaaaattagctaggcatatggcacatgcctgtagtcccagatactcaggaggctgaggcaggagattacttgagtccaggaggtcgaggctgcagtgaactatatttgcaccactgcactccagcctgggtgacagagcaagaccctgtttcaaatatctatatatttacatttatatgtataatgtgtacatatgtgtgtatttatgtatttgaaaactttaatgtgtgtgtacatatatatatagtcaaaaacggaaatcatgtcagtttttaatttttaactgaaattaattgaaatagcccggccacggcagctgacacctataatcccagcacttcggaaggctgaggccggcggatcacttgaggtcaggagttcaagaccagcctggccaacatggtgaaacccgcatctctactaaaaatgcaaaaattagccaggcgtggtggtgcgtgtctacggtcccagctactcggagtcccagctacatatatatgtgtatttatatatatgtgtcttcaaaaaatggaatctagtgccagtttttaatttttaattgaaatttaagaataggaagtatttgctgggtgcggtggctcacacctgtaatcccagcactttgggaggctgaggcgggcagatcacgaggtcaggagatcgagaccatcctggataacacagtgaaaccccgtctctactaaaaatacaaaaattagctgggtgtggaggtgtgcctgtagtcccagctgctggggaggctgaggcaggagaatggcgtgaacccaggaggtggagcttgcagtgagccaagattgcgccactgcactccagcctgggtgacagagcgagactccgtctcaaaaaataataataaaataaaataaaaagaacatgaagtatttgcttccctgatggcaccagccacacttccagtgctcagtagccccatggccagtggctacagtagtagatagtgccacattgaaaatttccttcatctcagaataacagaaatggtcagcactggtctaaaatgacatgggtcggccaggtgcagtggttcaagcctgtaatcacagtactttgggaggctgaggcgggtggatcacctgaggtcaggggttcgagaccagcctggccaacatggtgaaaccccatctctactaaaaataaaataaaataaaataaaataaaataaaataaaataaaataaaataaaatgtgtcaaactcctattgatgcttcaaaaccccatctcccttgcctcctcttacatgcagctttccttgattcctccgacagagccccaactctccctccagttcctccagccccaagcctctcattctgtcctgtacttgctcatatagggaaacagggtgggcggggtgggggggttccgcctgtgctggctcatacagggaatccgggttgggggttggtctgtgccagctctgtcttcctgggcatgggctgggccagagctaaggtctcctgagagccagcactgcctggcaggagactgtcccggagactttttaataatttattattattagggtttttttgtgttttttttttttgtttttttttttaagacggagtcttgctctgtcgcccaggctggagtgcagtggcgcgatctcgacttactacaacctccgcctcctggcttcaagtgatcctcccacctcagcctcctcagtagctggaattacaggcatgtgcccccatgcccggctaatttttgtatttttagtagagacggagtttcgccatgttagccaagctggtctggaactcctgacctcaagtgatccgcccgcctcggccttccaaagtgctgggattgcaggcgtgagccactcggatttttatttttatttatttatttatttttagagagaggctcttgctctgctgcccaggctggagcgtcatgttgtgatgataactcactgcagcttcgacctcttgggctcaacggatcctcccccttcggcctcagcctcccaagtagctagaactccaggtgcaagctaccgcacccagtaagaatcctattctcttttggactgacaaactcctactcatccaacaaagccccagctccaatggccccttctctgaggaacctgccctggttccctggtccacctcccagctagtagagttccctgggaaggggttagacgcctctaagtggcagagaggggccctcattcctgccccaaaggtagccttctcccctcccctttctggcagaagagaagtctgagatggagaaagagtgagagccgcccacgagctctgagcagagagcccgcaggagtgccacgtcccggcggcctcggcccctccctgcctcagtttcccgtggcatcaaagggggcgaggggcccctccaggcctctggtgacgggggtgctgtgcccaggcgggggtccgggggcgaccgagggggctcaggaagtccgcggccgcaggaattcggcgcctccaggccttataaggacatttgcgctccgggccaatcagcggcgggggcgtggcgcgcggagcccggcgcgtcccaaccccgcgccagcccggcggtcccgtcccgtcccgtcctgtgcggccccgtcccgccgcccgcccgccagccatgagctccacgcagttcaacaagggcccctcgtacgggctgtcggccgaggtcaagaaccgggtgagtgaggggcgccccttgtccccccgacagcgcggccgtcgcacgctccgaccggtgcaggagcccccaggcgcccccggcacctcccgggcagggagcttggagacccggggcggacgggcccttgttctccctgacgcctggtggggggatgtctgcgggcaccccctgaggctcccgcgaatcttggggagcacccaggtctgagatctgggggacgagtgacccattcccccccccaacatctaggggtagttgggtctgacttcgtcccctcgccatggccccaggacccccacgtgtgaagcccctggcgcccactcaaccttcgagaaggtccgttcaaggtccgacaacgctctgggggtctgggggggaccccagcaaccccgtcatctcctggccacacttctgcttttggggcctcttagctttgggaggggaaggggcatggccgagtggtttttgagaagtgttacccccccacaaacaggaatttcctggcctctgggacaccttgggggtgtcttggggggaggggcggtagccgctttgcacggtctttgtctcccatctgactaatttaaacggataacaaagaggttctctgaaggtggccctgagatatgtggggttttgcagcctcgaaagaagagctggggcccggcagggcgcgggggctcacgcccgtaatcccagcactttggggggcggagctgggtggatggcttgagcccagcgagttcgagaccagtctgggcaacatggcgaaaccccatctctataattaaaaacaagccagggctaggggagacactttttaagagagcacttgtggttctagctcagagaggaccagacacttctgcagggtcacacagcagggtcctggacaggattcccagggaaagtggggggcgggggttgtgatgcgagacccacggacaggaccgggacctgaccctccaggaccttccagctggaggggggtgtcgtccccgcccaccccctcccccgacgcccactgggcacctgggaaggtgtccttacagctgacttctgcaggggaaactgcctctgcacgctctgagggcaccggccctgccagccccaacagccacctgcccggcggcactccagggccggcagactggagggagaattcctgcttccccgctgtgagcccctgcaagccttcagaccagctcttggccaaaaagggaggctgaggcttggggtggtcaaggcctgagccagggtccccagcccggggctcacgactcctccttcaaggggccatctgcaccctgcattcatagagccccccgtgcagtggggtgggcaccctgccgcaccctgcatacagccggctaagggcaccggtgtccacagggacccagagacgtcgttccagctgcccagggccacacagcccacaagtgacagggccaagaccggaacccagtacctgctgggcctgcggaagtgggagcgggcacaggagggtggggcggcttccggagacggggtggggtggggtgggggcaggttgatacctgccctggcgggggtgaggacagaggctggaagagccgcttagcaggctccccgcgcaaccctcagtctgtccgtttggagggtgggcgaggcgtcggccagcttgccagggtcacggaagggtcgcctcccaattagaaaccagcttccccctggcttcccgctcacacccgctttaccggctgcttgaaacagccagagacccgccccccgccccgcttccccgtggctcagttgactcccggctggacggcacggaggcagctcggatccacagtgtctgcggccttgcatcccggcttgggggtccggacccgctgggaacagctggttcagatttagccggggaggcagcgcgcattcctggcagtttgtggtgaacaggaatgtgctggaaggccggcggccgggcagcgggggggcgggggtgggggaggacggcagcggctgggggtggggccaggggacctgggcccctgagccggcagagacgcggcgcagctgggcaaggcagggctgtgtacccagcagccaccgttctcattcctcgggatcaaagttgccggcggggcggggctgcccccgggcgtggaaagccaagctgggtgggctgtgagctggtactggggggcctccccgcctttgcctcctctgggctacgagctgtttccaggcaggtgccaggtcaggggaccctaacccaaataatcccaggcaggtccaggtcaggggaccctatcccaaataatcccaggcaggtccagctcaggggaccctaacccaaatcatcccaggcaggtccagctcaggggaccctaacccaaatcatcccaggcaggtccagctcaggggaccctaacccaaatcatcccaggcaggtccagctcaggggaccctacccaaatcattccaggcagatctagctcaggggaccctaacccaaatcatcccaggcaggtccagctcaggggaccctaacccaaatcatcccaggcaggtccagctcaggggaccctaacccaaatcatcccaggcaggtccaggtcaggggaccctacccaaatcatcccaggcaggtctagctcaggggaccctaacccaaatcatcccaggcaggtccagctcaggggaccctaacccaaatcatcccaggcaggtccagctcaggggaccctaacccaaatcatcctaggcaggtccagctcaggggaccctaacccaaatcatcccaggcaggtccagctcaggggaccctaacccaaatcatcccaggcaggtccaggtcaggggaccctaacccaaataatcccaggaagagatgaggaagcggaggctgagtggggagctgtccgcgggaacctggggagatgggtgcagagcagggagagggatttgattttttttttccttctctcttttctttctttttttttttaagacagaggctcactctgttccaggctggagtgaagtggcccgatcttggctcactgcctcctctgcctcctgggttcaagcgattctcctgcctcagcctcccaagtagctgggactacaggtgcccaccaccacgcccagctcatttttgtattttagtacagacgggatttcaccatgtgggctaggccagtctcgaactcctgacctcagatgatccgcccgccttggcctcccaaagtgctgggattgtaggtgtgagccaccgcacccagcccaaaccctactttattctccctccagcgtttatctcccgctcccgctacacgacctgcccccatgcttatggccccctatacactttgccgtctgcctcagtgctgtctccgcggtcactagtggctggatagggacactcgaggtccccactggtgcacacccactgcccaggagcacacagcccattccccacggcggtgtctcagagcaccgaaggccaagaaagctggaatggccgggtgcagaaaggtggcagggaatcggtggcaaggagccaggtgcgtgactagaggcggtcagcctcgggggcagctccttcgggagttgctaagaagcaggatgggggccgggcgcggtggctcacacctgtaatcccagcactttggagggctgagacgggcagatcacgaggtcaggagatggagaccatcttggctaacacggtgaaaccccgtctctattaaaaatacaaaaaatgagctgggcctggtggcgggcgcctgcagtcccagctactcgggaggctgaggcaggagaatggcctgaaccggggaggcggagcttgcagtgagccgagatcgcaccactgcactccagcctgggcgacagagtgagactctgtctcaaaaaaaataaaaaagaaaaaagagctgatggttgcacaacattgcagacgtacgaaatgctgtgaaatggtgcggtttcaggtggttgaagtggtaaacgtcaggtgtgatatagcggggaggtgagaaggcagggcggggaggcagatccggccaggtttgtcctgcaccgggagtggattagagctgatgtttatcagtgagttctaagccggttgtcggcctgcttggagggcggtttatctgtgcccgcctgcagtggctggggcgcccccaatgatgggaaaagggagcatctgcgtgggtgtggtgaggggggacctccaggccgctctatctgctgttgccctggagtccccggccccaccctctgcagagcttctgtggggttcctgctgggggtgcccccagcccagctcagtctcgtgccctttgctccaccagctcctgtccaaatatgacccccagaaggaggcagagctccgcacctggatcgagggactcaccggcctctccatcggccccgacttccagaagggcctgaaggatggaactatcttatgcacgtgagtacacgcagggacacaggctgtctcacacttaacaaatcttggtttttctcactttttttcttaattaagaaatttttggggggccgggcatggcctggctcatgcctgtaatcccagcacttttggaggccgagggtggtggcggggggcggtggatctcgaggtcaggagttcgagaccagcctggccaacatggtgaaaccccgtctgtactaataatacaaaaaaattagccaggcacctgtaatcccagctactcaggaggctgaggaaggagaattgcttgaacccgggaggcggaggttgcagtgagccgagatcacaccattgcactccagccggggtgacacagcgagactccatctcaaaaaaaaaaaaaaaaaaaaaaaaaagttagctgggcgtggtggctaaataaataattttttttttttgaggtggagtctcactctgttgcccaagctggagtgcagtggcatgatctcggctcactgcaacctccacctcctgggttcaagtgattcccctgcctcagcctcccgagtagctgggattacaggcgactgccaccatgcccggctaattttttttgtatatttagtagagatggggttgctccatgttggccaggctggtcttgagcccttgacgtcacgtgatctgcctgcctcggccttccaaagtgctgggcttacaggcctgagccaccaaacccagccaaagattactttataagagtggaaacttgaggcctgggatggtggctcacgcttgtaatcccagcactttgggaggttgaggtggacggatcacgaggtcaggagatcgagaccagcctggacaacatggtgaaactccatctctactaaaaatgcaaaaattagccgggtgtggtggcaggcacctgtaatcccagctactcgggaggctcagggctgaggcaggagaatcacttgaacccgggaggtggaggtggcagtgagtctagatagtgccattgcactctagtctgggtgacagagctagacgccgtctcaaaaaaaaaaaaaaaaagagtggaaactgaggcccagagagaggccgtgagtttgcccaggaaggcgtgagcttggctgagatcagcatcgggtcttcacggttcctcgctgctcacagaggtttctgtttcccccgccccatgttgtgccctccagactcatgaacaagctacagccgggctccgtccccaagatcaaccgctccatgcagaactggcaccaggtgaggggctggtggagcggagcagggatggtgctgggggcccatctaacaggtggggagactgaggcccactcactgtccctctcctgcctcttcccagctagaaaacctgtccaacttcatcaaggccatggtcagctacggcatgaaccctgtggacctgttcgaggccaacgacctgtttgagagtgggaacatgacgcaggtgcaggtgtctcttctcgccctggcggggaaggtgaggcccagagaggggcagccacctgcccagagtcacacagcgaggtggatgtagctgctgcattcactcgtttgcaaatttctgtttgtttatttttgagtcggagtctcactctgtcactcaggctggagtgcaatggcgtgatctcagctcactgcaacctccaactcccaggttcaagcgattcttctgcctcagtctcccgagtagctgggattacaggcacctgccaccacgcctggctaatttttgtatttttagtggagactgggtttcaccatgctggccaggctggtcttgaactcttgacttcaggtgatccgcccgcctcggcctccccaagtgctgggattacaggcatgagcccctgtgcccggcctcgtttacaaatatttctgagcatccgtgaggtgccaggtacttcagattccttggtgaacaggaaggacatggtctaccccttatgcagttcagtctgatggcggaggcatgcaaaagtgaacacagcattgtattatgcattatatgtaagctctggccgggcgcagtggctcacacctgtaatcccagcactttgggaggccgaggttggagaattgcttgacaccaggagttcgagaccagcctggccaacatggtgaaaccccatctctactaagaaaacaaaaattacctgggcgtggtggtgcatgcctgtaatcccagctactcgggaggctgagcccaggagttaagaggttgcagtgagctatgaccacaccactgctctccagcctgggcaacagagcaagactctctcaaaaaataatcataacaaaagtaataaataagctctgaactgggagaaatgccttgaaggagaagaatcagacgaatgttgagtgtctagtgatcttcaaacccagaccgggagcgtgggtgggacagtggtgtagaccgggagcgtgggtgggacagtgtctggtgtagaccgggagcgtgggtgggacacggtgtctggtgtagaccgggagcgtgggtgggacacggtgtctggtgtagacggggagcgtgggtgggacggtgtctggtgtagaccgggagcgtgggtgggacacggtgtctggtgtagacggggagcgtgggtgggacggtgtctggtgtagaccggcagcgtgggtgggacacggtgtctggtgtagaccgggagcgtgggtgggacggtgtctggtgtagaccgggagcgtgggtgggacacggtgtctggtgtagacggggagcgtgggtgggacggtgtctggtgtagaccggcagcgtgggtgggacacggtgtctggtgtagacggggagcgtgggtgggacggtgtctggtgtagaccgggagcgtgggtgggacacggtgtctggtgtagaccgggagcgtgggtgggacggtgtctggtgtagaccgggagcgtgggtgggacacattgtctggtgtagaccgggagcgtgggtgggacggtgtctggtgtagaccgggagcgtgggtgggacacggtgtctggtgtagacggtaagcgtgggtgggacacggtgtctggtgtagaccgggagcgtgggtgggacggtgtctggtgtagaccgggagcgtgggtgggacacggtgtctggtgtagaccgggagcgtgggtgggacacggtgtctggtgtagaccgggagcgtgggtgggacggtgtctggtgtagaccgggagcgtgggtgggacacggtgtctggtgtagacggggagcgtgggtgggacggtgtctggtgtagaccggcagcgtgggtgggacacggtgtctggtgtagaccgggagcgtgggtgggacggtgtctggtgtagaccggcagcgtgggtgggacacggtgtctggtgtagacggggagcgtgggtgggacggtgtctggtgtagaccggcagcgtgggtgggacacggtgtctggtgtagacggggagcgtgggtgggacggtgtctggtgtagaccgggagcgtgggtgggacacggtgtctggtgtagaccgggagcgtgggtgggacggtgtctggtgtagaccgggagcgtgggtgggacacattgtctggtgtagaccgggagcgtgggtgggacggtgtctggtgtagaccgggagcatgggtgggacacggtgtctggtgtagacggtaagcgtgggtgggacacggtgtctggtgtagaccgggagcgtgggtgggacggtgtctggtgtagaccgggagcgtgggtgggacacggtgtctggtgtagaccgggagcgtgggtgggacggtgtctggtgtagaccgggagcgtgggtgggacacggtgtctggtgtagaccgggagcgtgggtgggacggtgtctggtgtataccgggagcgtgggtgggacacggtgtctggtgtagacggggagcgtgggtgggacacggtgtctggtgtagacggggagcgtgggtgggacggtgtctggtgtagacggggagcgtgggtgggacacggtgtctggtgtagaccgggagcgtgggtgggacacggtgtctggtgtagaatggaatgggagtgtgtgtttgtgacatggtgtctcacgtagaaggaacagcaaggtcttgacattggaattggctgggctgttagaggaagcgggagctggttttctcctggggtaactgctccaaatggtgttttcagatgccccctgtggctcccagtaacctcacgtggggaatggtggtcagggaggagccgggcgcagacatcccagtgaggggcagagccaatggcctggccatggtgcccggggattgggtcagaggaggtggtggaaggtgagagagaggaagcgaaaaccacgtccccatccccagaattcttggcctgagccctggaaagctgagctgttgcctaagacaaggcacgctgggatgaagcagccccatgggctgggcgcggtggctcacgcctgtaatcccagcacttttggaggttgaggcgggtggataacttgaggccaggagttcaagaccagcctggcaacatggtgaaaccccgtctctactaaaaatacaaaaattagcctggcgtggtggcacacgcctgtaatcctagctacttgggaggctgaggcaggagaattgcttgaacctgggaggagggggttgcagtgagcggagatcacaccactgcactccagcctgggtgacagagccagactccatctcaaaaataaaaataaaaaactgaaacagctgtatgatgggtgtgtggagtgtgtggagtcccagacacccgagagatgtgcctgtgggggctctgcgcggcaggcagaggtgacaggccgcggcctggtctctgtcccgcccccagggcctagatctagggtccctggctgccctctgctggtactcccggcccctttccctcacccaggccaagactaaggggctgcagagcggggtggacattggcgtcaagtactcggagaagcaggagcggaatttcgacgatgccaccatgaaggctggccagtgcgtcatcgggctgcaggtgggcgacagctcccccagccccagggaccacggcattgggggaccacggtgttgggggacagcagcattgggggacagcggcatggagccctgtggtccctcaatttcagggagggaccggaagcttgttgggtgcagtctgacctctcccacgaacctccctgcagatgggcaccaacaaatgcgccagccagtcgggcatgactgcctacggcacgagaaggcatctctatgaccccaagaaccatatcctgccccccatggaccactcgaccatcagcctccagatgggcacgaacaagtgtgccagccaggtggggctcgcccgggtgcccccgactcctctccctgcccctctacaccctgtggtctcggcccctccctggggccacctccagcttctctccccactctcagtctcagccccttccctagaccacctccggcttccctccccgctctctgtctccgccttggatttcagcctctgtcatttccacctggctgtgggtctctagggaagttactacctcaccctgtgtcattttcccttaaggactgcccaaaggtccacccaattctttttttttaatctttatttattttatttatgtatttattttgagataggatctcactctgttgtccaggctggagtgcagtggcacgatctcggctcactgcaacctctgcctcccgggttcaagagattctccttcctgcctcagcctcccgagtagctgggactacaggtgcatgctgccacacccggccaatttttgtatttttagtagacatggggtttcaccatgttgcccaggctggtctcgaactcctgagctcaggcaatccacccgccttgacctcccaaactgctagggttacaggtgtgagccaccgcacccggccacacccagctaatttttgtatttttagtagagacggggtttcactgtgttggtcaggctagtcttgaactcctgacctcaggtgatcctcccacctcagcctcccgagtagctgagactacaggcgcccgccaccacgcccggctaatttttgtatttttagtagatatggggtttcaccgtgttggccaggctggtcttgaacttctgacctcaggtgatcctcccacctcagcctcccgagtagctgggattacaggcatgtgccaccacgcccagctaattttgtatttttgggagagacagggtttcaccgtgttggccaggctggactggaactcctgacctcaggtgatcctcccaccttggcctcccaaagtgctgggattacaggcgtgagccagtgcacccagtgaaggtcccctcttctctccaccatgacctgctccacccctccttcctctccaggtgggcatgacggctcccgggacccggcggcacatctatgataccaagctgggaaccgacaagtgtgacaactcctccatgtccctgcagatgggctacacgcagggcgccaaccagagcggccaggtcttcggcctgggccggcagatatatgaccccaagtactgcccgcaaggcacagtggccgatggggctccctcgggcaccggcgactgcccggacccgggggaggtccctgaatatcccccttactaccaggaggaggccggctactgaggctcccagcacgctctctccccacatcgtctgcccatctgggtttttgggtttttctgtgttttcatcttttttttttttttcttaacccgttcagtgctgccagtcaaccaagggtctgtgagtgtcagcgtgggatcaggcagcagagcttttttcccctttgccttgatccttcgcaaggctgagccactgggctgtgggggaaggggtcaaggccatatcccaatacgtgtagggcgagggtccctgctggcacattcaggctgtgctgggaagaagagacctgggcttggaaggaaccggtccccgacggtttctgcttgcctcgcctcttcccccttttgtcagctgagcagtttgtggtttctatgcccgcaagtttcaggaagtattcacaaaagaaaaatacattttttcccccaggggtggggcaaggacagtggagagagtgctaggaaatgagtcccctgggaaaggggaccgggccgtgatgttaaatatctccggctcccaagtgactggatttgcctaggaccttcagaccaacagacttcagaccctcagacctgccccggggccaggtggagaaagtgagggccgtacaaggaagtgaaattctgagttgttggggctaagcctgaccccctctccatgctccccgccccaacccactctggcctcagtagatttttttttcagttgtggttgttgcccaggctggagtgcagtggcgccatcttggctcactgcacctccaccttccgggctcaagcgattctccagcctcagcctcctgagtagctaggactgcaggtgctccaccacgcccggctaatttttgtatttttagtagagatggggtttccccatgttggccaggctggtctcgaactcctggcctcaggtgtgatccgcccgcctccgcctccccaagcgctgagattacaggtgtgagccaccgtgcccagcccctcagtaggttttaaggagcccccagccctcctcccttctgggcccgaccagcttatactgctccatcttccccggccacatgccccgccaagtactgcacagggaccccccacccaggggacctgctccgtgagataatgtgaaatacgactgtggaccaaacgcaataaaacctctgtttgtacgaagagaaggtggccaagagagttggcgtcgatgagggcgtgctttgctttgatgcttttgtggggagagaggaggtcttgggggatggggggatcaaggggaaaatgtccacctcaccattgggaggaggagcaaaagctgaagccacaggtgagtctgggtggaatgaatgatttgaagggccgggacttggggtagagggagaggctgggcttcctggccatttggagaagaggcagttccctcaaatgccccccatgcgctttggctgcactctaccttacagcgcaagtctcgtggcctcagcctggatgtctccccgttggcgaactcctatttatcctcaaagccccaacggcaatgccacctcctgccgcgggagccgtccccacgcctctcactctccccagcgccttcaaagctgtggacccacacgctcccatttcagcttcacctccagcctgaagagtttatttcaactcttcttccagagtgggaaacgggttttcctcaaaatcagggtagccactataatcggagactctagaatgttggccccctccccctcctgccatcctctgcagaagccgaggagcgttcgtggaatgaatgaatgaacgaatgatctagtggaacccctactttacagacggacgagtgtagtcccagagtctggactaaactagagggagcctggccagccccggggacagcggggacagagggaactcctgcaattcggagctgcggtattgcagccggttatacaacgtggggaggcagcctggctccccaaagacagcgcagcctcgttcccggagggcggcctgcctgggacctgccgggcactccgccaccctacggtgatgcagcaagagccgcgcggtccctttaagaaacccggctaggcgaggcccttctgtgatcccgtctcctcccttggcccgcgcagctccgacggagcaggccagtgagtgacgggcaggtcgcccaatagcagcgtgcagaggcaggggcgtgccccggcgctgctacctgcgcgggcaagctcagcgcacttggcttaaggggcggcgcgctccctgcctgctgctgggcggagggaaggcggcaagagctgcggagcccctggaaggtgagaaggactcggagagggaagaaggcccgagactcgagaatgcggggttggggccgggagggatgcaagttccctgggaattagggggtccagcctctgacctccttccggtgaatgttgacgacggctgaattgatcactgattctcaaggggggcatcggacatctgggacccttaagagggcctttgccgatcacacacctgcagccccctgcccgttagaactcctgcactcccccttgccccgtcttacaaatggagaaactgagcccactcccccagatcctaagtcccgcttgatgtaaaggaaagaaccctggcgtaagggtctgggtctgaggtcccagttccggcctggtcacctttagcaacttcctgcccctctgtcagcgtcagattctccatctgtgtcagaggtggaccggcccaaggaaaatagatcaggaatcgctgactccaggagtctctatcccagccccttcgcctgactctttctctggctcccgcggtccctctgagcgattaatgctacataaggtgtgggcagagctggggtcgtgcctccagctgggcaactgcctgtctctctgggtgcctgggtttgctttcttgggcctcggtttccacttctgtagagtggggtgatagtccagcacttcccctgggcgtgtgaaatgtccagcactgccaatattcgttgctgttatcttcggagaacagtgaggggaaaggaatccttgcctgggctgggccaggcaggaggctgggggtcaggacctggaagaggcttccaggtgaggcttggggtggagcctggtgacgaaagcgttaagcccaaactcggtccctggaggattagaggatgatctttaagtccccagctgtcagccctgctcagagcgacagtcctggcagccaatcagatgcgaggacggctgcgggttgcgctcccattggtttactccacccctggggtagcggagcctctttatcgagtgactactgtttgcctcgctctaatcagagcttccaggaaccctgcgctgtgggataaaggaatgaggttcagaaaggggcagggagttgcccgcagccgcaccgcacgtcttcagcccgaccgttgtcctgacctctctgtcccgtcccctgcccagtctcaccatggccttctggacacagctgatgctgctgctctggaagaatttcatgtatcgccggagacagccggtaacgccccagtgtgagaccagggccgggtgggcaggcagcccccactgtcccccaccgtctcccacctattctcccccaggtccagctcctggtcgaattgctgtggcctctcttcctcttcttcatcctggtggctgttcgccactcccacccgcccctggagcaccatgaatgtgagcccccccagggaccaggcactttgtgtgtgtaggggaaggcagatggctcacccgtgcacaggaatcccccgtgcatgtcagggagccttcaccaggccgccaatacatggcatgggagtgagctctccatcgctggaggcatgcaagcggtgccgggcgacccgatgggggtggagtcaggcagagtccacagggcctcagcaccaggcgtctccccgcaggccacttcccaaacaagccactgccatcggcgggcaccgtgccctggctccagggtctcatctgtaatgtgaacaacacctgctttccgcagctgacaccgggcgaggagcccgggcgcctgagcaacttcaacgactccctgtgagccagaggcagtgggtgcggccggcctgcaaactcggggctgcagtgccggccggaaccccgcctcctgccctctctctgtccccagggtctcccggctgctagccgatgcccgcactgtgctgggaggggccagtgcccacaggacgctggctggcctagggaagctgatcgccacgctgagggctgcacgcagcacgggtgaggaggccggggggcctctggcagggctgagctctgagcctcaacttgccgggccgtgaaatgggcacagggtgggggtgggtgcctcagaccaacgtccccccagccccatgctcccgtgcgctcctcccccagcccagcctcaaccaaccaagcagtctccactggaaccacccatgctggatgtcgcggagctgctgacgtcactgctgcgcacggtagggtgtcggggcgggaccgcgctgacttcctgggacactgcactggggatgtcctggcactgccccaccccgggccaaggacctcccgttccaggcatccaggctgtccctggtctctgcggtgatgctgcttgtccgtctgggcccccagacagagtgtgtctgacccagtgaggaagactcgtctgtgagatctccaatgagtccctttgcctctcagagcctcagtttccctatttgtaaagtgggggctatgatagtatggtctgcctgggaactggccagagcgctggacccctagtgagtgttcaaaatcattgtcccccttgtggtctttctccccaggaatccctggggttggcactgggccaagcccaggagcccttgcacagcttgttggaggccgctgaggacctggcccaggaggtacgaggccccactcatcctcaacccccatggaggcaacgttggcaggcagcctgcgccgggagggtctggggcagcccgggcacttcccttgggtgggttttcaggaggattagacagcgagagggagaggctgcccctggcccagtgccctgccctggttagggcttggaggtgggatcattgccagctccgtctggtaacctctctctagctcctggcgctgcgcagcctggtggagcttcgggcactgctgcagagaccccgagggaccagcggccccctggagttgctgtcagaggccctctgcagtgtcaggggacctagcagcacagtgggcccctccctcaactggtacgaggctagtgacctgatggagctggtggggcaggagccagaatccgccctgccagacagcagcctgagtgagtgactgacctcggtttcccctcttgggaagtggaactctgggcaggggggcagggcctcatggcacccccatcccaggccccgcctgctcggagctgattggagccctggacagccacccgctgtcccgcctgctctggagacgcctgaagcctctgatcctcgggaagctactctttgcaccagatacaccttttacccggaagctcatggcccaggtgggggcagcctggatgctggggtgggagggtggtggccagagcccatccagtaccctcagtccaggtgggccagggccaggccggagggtcacggaaactatttgaagaagtaggagttagccgatggagggggatcagcttgtgcggaggatcagaggcacacgcaggagcaaggcagagggggcagggggtgggcaggggtcctcagaggaggagagggtcatcagtggagggggtgctgtccacaggtgaaccggaccttcgaggagctcaccctgctgagggatgtccgggaggtgtgggagatgctgggaccccggatcttcaccttcatgaacgacagttccaatgtggccatgctgcaggtgtgcgggggtgctggggaggtgggatgtggctccccggtgaggagggtagacaggcccggtggatgggaaggtgggctccgtgcagacccccacttttttttttttttttttgagatggagtctcgctctgtcgcccaagctggaatgcagtggcgtgatctcgactcactgcaacctccacctcccgggttcaagcgattctcctgtctcaccctctgagtagctgggactacaggcgcccaccaccacgcccggatgattttttttttttatttttagtagagacggggtttaaccatgttagccaggatggtctcgatctcctgacctcgtgatccacccgcctcggcctcccaaagtgctgggattacaggcgtgaactaccacgtcctgctttttttttttttttttttttttttaagagatggagtctcactctgttgcccaggctggactgcagtggcgagatcttggctcactgcaacctccgcctcctggattcaagcaattctcctgcttcagcctcacaagtaactgggattacaggcatgcgccaccactcccggctactttttgtatttttagtagagatgggctttcaccatgttggccaggctggtctcgaactcctgacctcaggtgatccacccgcctcgcctcccaaagtgctgggattacaggcatgagccactgtgcccgacccagactctcactttcacctgcgccccccagcggctcctgcagatgcaggatgaaggaagaaggcagcccagacctggaggccgggaccacatggaggccctgcgatcctttctggaccctgggagcggtggctacagctggcaggacgcacacgctgatgtggggcacctggtgggcacgctgggccgagtgacggaggtgagggcctgtccacctgcggggtctgtttcagtggggagggcaggtcccatcctagtgttcccaccctggtgttcccagggggaggcgggcccggccctagtaagagcctgggatttgtagagatctcaggagggagccggccgtgggcctacgaggggaaaacatggcccagccccgaggtccagggggaggagcggagtggtctaggaggcaggcggaccccagcgcctaggactcacccccgcatcccacagtgcctgtccttggacaagctggaggcggcaccctcagaggcagccctggtgtcgcgggccctgcaactgctcgcggaacatcgattctgggccggcgtcgtcttcttgggacctgaggactcttcagaccccacagagcacccaaccccagacctgggccccggccacgtgcgcatcaaaatccgcatggacattgacgtggtcacgaggaccaataagatcagggacaggtcaggcgagggagggggcggggggatgagggactgggcggggccaagagcgtggtgggtggggccaggcagcattcagcctattggagaccatgatagacaggatctgggctgtatcaacagtggtatggtagccagagcccggggctccttagaccaataggggcccgtgatgggcggggcctaggtgcatgaggggcgtggccatgggcctgagataagatgagagcaggtataggttgagggcaatggtgggcggagccaggtgtattattaggtccctggaataagggtggagctaaaattgcaccgggtgctgagcgcagtagatcttgcctgttatctcagaactttgggaggccaaagtgggagaatctcttgaggacaggtattcgagactagcctgggcaacatagtgagaccgcctcccccccgcccccctcccccaccaacctcacgaaaatatctttaaaaattagccaggtgaggccgggcacagtggctcacgcctgtaatcccagcactttgggaggctgaggcgggcggatcacgaggtcaggagatcaagaccatcctgactaactcggtgaaaccctgcctctactaaaaaaaaaaagtacaaaaaattagccgggcgtggtagcacgcgcctgtaggcccagctacccaggaggctgaggcaggagaatcgcttgaacccaggaggcggaggttgcagtgagccgagatggcgccactgcactccagcctgggcgatagagcgagactccgtctcaaacaaatgaataaatgaataaaattagccaggcgacttgggaggccgagctggggggatcgtttgatcccgggaggtcaaggctgcagtgagctatgattgcagctcttcactccagcctgggcgacagagcaagaccctgtctaagaaaaaggttattcagggtggggccccgggagtttctagcccttccctacaaccggccaccatgcccctctcgcaggttttgggaccctggcccagccgcggaccccctgaccgacctgcgctacgtgtggggcggcttcgtgtacctgcaagacctggtggagcgtgcagccgtccgcgtgctcagcggcgccaacccccgggccggcctctacctgcagcagatgccctatccgtgctatgtggacgacgtgtgagctctggcacccctccccgctcttccccgcggcgggaaggtcccgggtgtgggggtgggcccaggctctgttgggaaccttcctgcggtccaggctgcgaactttgcacctttacaccactccacgtgacctgctgcagcgggaggagcaggggactctgagggtctggtggggggggggactctgagggtctgggggcccccggcgcagggacagcctgggctgcactgatgcctgagagccaaaggctggctggatcaggttccaaggaacagggaggcaaatcttcccgccttgagatcccgggacacgaaccagtcgtgccagatggtgggcggagggggggtctgcggagggtctccagcctccaccccagccgtccccaccccaggttcctgcgtgtgctgagccggtcgctgccgctcttcctgacgctggcctggatctactccgtgacactgacagtgaaggccgtggtgcgggagaaggagacgcggctgcgggacaccatgcgcgccatggggctcagccgcgcggtgctctggctaggctggttcctcagctgcctcgggcccttcctgctcagcgccgcactgctggttctggtgctcaaggtgggcgcgcctcggcctgcccggctgcagaatgggtgcgctggagggtgacagacaggggcggccccacgtgggtgcgcgcccccaggccaatccaggagctgcaccctaagctcccgttgcctctcacagctgggagacatcctcccctacagccacccgggcgtggtcttcctgttcttggcagccttcgcggtggccacggtgacccagagcttcctgctcagcgccttcttctcccgcgccaacctggctgcggcctgcggcggcctggcctacttctccctctacctgccctacgtgctgtgtgtggcttggcgggaccggctgcccgcgggtggccgcgtggccgcggtgagagccgggtcgggcgtggatgggggacgccccccgcttcggccgctcactgaccgcccgcttttccgcagagcctgctgtcgcccgtggccttcggcttcggctgcgagagcctggctctgctggaggagcagggcgagggcgcgcagtggcacaacgtgggcacccggcctacggcagacgtcttcagcctggcccaggtctctggccttctgctgctggacgcggcgctctacggcctcgccacctggtacctggaagctgtgtgcccaggtgggccgtagggggcggggctccgggccgggtcgcacctgctttgcgggaggctgagctaggggtgtggcctccaggccgtttgggggtggggggtggcttattcccttggagagaaggcggggcttcttggcacacgcatgcaggtggctgcattggaggggcggggcctgaggcaggtgggcggggtttctgggccgcctcatacctggacgccctgattccaggtgtatggccagaagctggcacagtcgccgggcgctgtggctcacgcttgtaatcccagcactttgggaggccaaggcaggagaatcgcttgagcccaggagtttgagaccaggctgggcaatatagtgagacctcatcaatacaaaaagttagctgggcgtggtggcacgctgggcgtggtggcacgctcctgtagtcccagctactcgggaggatggggtgggaggatcactcgagcccaggaggttgaggctgctgtgagccgtgatcccaccagcctgggcaacagagtgagacctccatctctttaaaaaaaaaaaaaaaaaaaaagctggctgggtgcggtggctcacgcctgtaatcccagcactttgggaggccgaggcgggcgggtcatctgaggtcgggatttcgagaccagcctgaccaacatggagaaaccccgtctctactaaaaatacaaaattagctgggtgtggtggcgggtgcctgtttcctagctacttggaaggcagaggcaggagaaatgcttgaatcccggaggcggaggttgcggtgagtcgagatcgcgccactgcactccagcctgggcaacaagagtgaaactcagtctcaaaaaaaaaaaaacaaaaaaaaaaaaaacaaggccgggcacggtggctcacgcctgctttcccagcactttgggaggccgaggtgggcagatcacgaggtcaggagatggagaccatcctggctaacacggtgaaaccccgtctctcccaaaaatacaaaaaattatccaggcatggtggcgggcgcctgtagtcccagctactcaggaggctgaggcaggagaatgacgtgaactggggaggcggagcttgcagcgagtcaaaatcgtgccactgcactccagcctgggcaacagagcaagactccgtctcaaaaaaaaaaaaaaacaaaaccccaaaaaaagcctggtacactcctggggggtgggctaagcaataacccgcgcccctccccgcaggccagtacgggatccctgaaccatggaattttccttttcggaggagctactggtgcggacctcggccccccaagagtccagccccttgccccaccccgctggacccaaagggtgaggcactacgaggcttaatagctggttgtccacatatgcccagttcccccccaaaacgagattccacagatgccaatgacaatgacctggacaccccaaccctcacacctgccctgaagacactgcggtccccaagctcccgcagcttttataggccccggcccagcaggtcccggattccacagcccagctctgagggacttgcaggccccaggacccccatgacctccatggctgagtccaccccatctctgcagtgctggtagaagaggcaccgcccggcctgagtcctggcgtctccgttcgcagcctggagaagcgctttcctggaagcccgcagccagccctgcgggggctcagcctggacttctaccagggccacatcaccgccttcctgggccacaacggggccggcaagaccaccaccctgtgagcccccaaccactccctccccgtgagcccccccactcccaccccgtgagcccccccaccactccctccccgtgagccccccaccactccctccccgtgaaccccccaccactccctccccgtgagcccccccaccactccctccccgtgagccccccaccactccctccccgtgaaccccccaccactccctccccgtgagcccccccaccactccctccccgtgaaccccccaccactccctccccgtgagcccccccaccactccctccccgtgaggccccccaccactccctccccgtgaaccccccaccactccctccccgtgagcccccccaccactccctccccgtgaaccccccaccactccctccccgtgagcccccccaccactccctccctgtgagccccccgaccgctccctccccgtgagcccccccaccactccctccctgtgagcccccccaccactccctccctgtgagttcccccaccactccctccctgtgagtcccccaccactccctccctgtgagccgcccaaaccactccctccctgtgagccccccaccacttcctccctgtgagctccctgtgaggcccccgaccagtccctccctgtgagcagtaatggcgccactgcactccagcttgggcaacggagtaagaccctgtctcaaaataaatagggcgggagtggtggctcacgcctgtaatcccagcacttgggcaagccgaggtgggaggattgcctgaggtcagagtttgagacacagcctggccaatatggcaaaaccatctctactaaaaatacaaaaattagccgggtgtgatggtggcgtgcacctgtaatcccagctactcaggaggctgaggcaggagaactgcttgaaccctggaggcggaggttgcagtgagccgagactgtgccgttgcactccagcctgggcaacagagtgagactctgtcacaaaaaaataaaaataaacaaataaataaaaataaggctatcacagggttttggatgtagcatttaataggtgctctgtggccaggcgtggtggctcaggcctgcaatcccagcactttggggggccgaggcgggtggatcacgaggtcaggagattgagatcatcctggctaacatggtgaaacagtgaaaccccgtctctactaaaaatgcaaaaaaattagccggacatggtggcgggcgcctgtagtcccagctactcgggaggctgaggcaggagaatggcgtgaacccgggaggtggagcttgcagtgagccgagatcgtgccgctgcactccagcctgggcaacagagtgaaactccgtctcaaaaataataataataataataataataataataataataaataattaaaaattttttaaaaacagaaattaaaaatagaagctctgtaactgccagtgcactctgtgaagggggctactctgagacccctctatccacaggtccatcttgagtggcctcttcccacccagtggtggctctgccttcatcctgggccacgacgtccgctccagcatggccgccatccggccccacctgggcgtctgtcctcagtacaacgtgctgtttgacatgtgcgtctcggcaggcccagagtgcagcggtgggaagggactggacgccctctgggactctgcctgccatgtgggtcactctgctctgtgcactggccgcaggctgaccgtggacgagcacgtctggttctatgggcggctgaagggtctgagtgccgctgtagtgggccccgagcaggaccgtctgctgcaggatgtggggctggtctccaagcagagtgtgcagactcgccacctctctggtgagcccatccccaagggaggtcacctcacagggaggggcctggggattcatcctgaaggcagggggaagccgggtactgaggtccacgtgggtaggcaaccttgcccaaggctgggtgtgacacactgaggtcccttccccatctctaccaggtgggatgcaacggaagctgtccgtggccattgcctttgtgggcggctcccaagttgttatcctggacgagcctacggctggcgtggatcctgcttcccgccgcggtatttgggagctgctgctcaaataccgagaaggtaagagctggggattctgctcgaggggccagaaaaggcttctgacaaggaagtgctggggatggggttttgaggaatgagtaggagtttgctacatgtggaccccacttgttgctatggcatttaggggctactgctcaaataccgagacagtaagagttggggatagacagaggttcccctggattctgcctgaagggccagaaaaggtttccaacaaggaggttctggggatgaggttttgagggatgaataggagtttgcttcatggggcagacaactcctggcagaggccccagctcgggcaaagacgcggcggcctgatggtagttgtgggttggtcccccgtgcctaggtcgcacgctgatcctctccacccaccacctggatgaggcagagctgctgggagaccgtgtggccgtggtggcaggtggccgcttgtgctgctgtggctccccactcttcctgcgccgtcacctgggctccggctactacctgacgctggtgaaggcccgcctgcccctgaccaccaatgagaaggtggggaccggccttctcctgacccctgacccccgggactctgttcagccctgaaggccaagccacttggtgcctctctgcccgcaggctgacactgacatggagggcagtgtggacaccaggcaggaaaagaagaatggcagccagggcagcagagtcggtgagggccggggtgggagacccaaggcgggtgggcagtggggtggctgtgccttaacttgaggaggaggagggggagggggaagaggaggaggagggggaggaagcggcagaggaggttgaggcggaggaggagggggaggaggagggggaggagtaagaggtggaaggggaggcgaaggggaggagtaggagggagaggaggagggggagggagaggaggagggggaggagaaggggggaggaggaggggaagggagaggaggagggggagaagaaggggaggagtaggaggggagcagaaggggaggaataggagggggaggaggagggggagggaaagggggaggagaagggggagaagtaggaggaagaggagggggaggagaagggggaggagtaggagggagaggaggaggagggagaggagggggaggagaaggagaggaggaggagagcacttgagaacctgagatgatgcccccatccctgggctgagccggaaccatgagactaacttgaacactgaccccacctttaacccaaccagggctgagcccagagacaaacctacccctgacctccaacactaggtccagcactgccctcaagatctctttttgtttgtttctgagtcttgctctgtcgcccaggctgtagtgcagtggtgtgatctcagctcactgcaacctctgcctcctgggttcaagcatttctcctccctcagcctctcgagtaactgggattacaggtgggttccaccatgcctggctaatttttgcatttttggtagaaatggggtttcaccatgttggtcaggctggtctcaaactcctgacctcaggtgatctgcctgcttcaaccctcaaagtgctgggattacaggcgtgagccactgcgcccggccgcacctggcctacgttcttaaccctgatctctgtctgccgggacagtcccctcacaggtcaccaatgcctcttccccagggagactggggtggggcgtgagccggggctccctgaagcacccctttgtccacacaggcactcctcagctgctggccctggtacagcactgggtgcccggggcacggctggtggaggagctgccacacgagctggtgctggtgctgccctacacgggtgcccatgacggcagcttcgccacactcttccgagagctagacacgcggctggcggagctgaggctcactggctacgggatctccgacaccagcctcgaggaggtgtgaggcctgggtggtggtgaggtggggccaggaggagggcttcctggaggaggtggtgttttgaaggatgaatagcgtgtttatgagcagcaaggacattcagggaggaggcatggcacatgaggagctctggtggctcagatgtcccttgggaaggcctgggggacccatggtgtaggaggggtggggggctcacaagcccccagttctccctgtcggtgtccagtctctgagcccctgcttgtctccccagatcttcctgaaggtggtggaggagtgtgctgcggacacagatatggagggtgcggccacagctccctgacccctgaccccagtccagagtgggaccagaggccaggtccccatccctggcttagtgtggcccaaggcatagcctttaccctatacctgattcctgatcccccaatccgtgaccctcaactttgaccctgacccctgatggccctgcagatggcagctgcgggcagcacctatgcacaggcattgctggcctagacgtaaccctacggctcaagatgccgccacaggagacagcgctggagaacggggaaccaggtaagtccttcccagtggccctggggtcctcccagccacccccccacagcagcgtgagcactgaccctctcatccctcacagctgggtcagccccagagactgaccagggctctgggccagacgccgtgggccgggtacagggctgggcactgacccgccagcagctccaggccctgcttctcaagcgctttctgcttgcccgccgcagccgccgcggcctgttcgcccaggtgaggagggctagcaccagggagtcgcatgggagtccctgagttccctaccctggccgtccactcagtggcctaatccaaacccttacccccgtgtgtattcccaacccaaagcacatttattgagggcactggggagccatgggtggttgtagagcaggagcagggacaggtgcaagcaagcctggagggtggatggaagcagcagctgatgggctggtcccccagatcgtgctgcctgccctctttgtgggcctggccctcgtgttcagcctcatcgtgcctcctttcgggcactacccggctctgcggctcagtcccaccatgtacggtgctcaggtgtccttcttcaggtgggtgcagaaggaaggggctggtggcaggaagactagggacctgggggtacagccctgaccctacatctcccctcacacacagtgaggacgccccaggggaccctggacgtgcccggctgctcgaggcgctgctgcaggaggcaggactggaggagcccccagtgcagcatagctcccacaggtgaggcgtcttgttggcctggacctttcccctctctggcctcagttttcccatctggtccctggccagggagcctcagggggcacctggagcatcccctgtgcccacctgggagctgggagcctctgtggctccaggaacccccagaagctgggtgcccacagaccttcaccttgaccctgcagcgcccttgagtgtgcacagcccattgtctgcaggttctcggcaccagaagttcctgctgaagtggccaaggtcttggccagtggcaactggaccccagagtctccatccccagcctgccagtgtagccggcccggtgcccggcgcctgctgcccgactgcccggctgcagctggtggtccccctccgccccaggcagtgaccggctctggggaagtggttcagaacctgacaggccggaacctgtctgacttcctggtcaagacctacccgcgcctggtgcgccaggggtgagccatgccctgggactcagtttccctggctatagcatgggtccttgggttgctggggctggtgtggtcctggaggaggaagtggaggggttggatgcccagcttggggctacgggctgggagtctcgcgtaccttcctttcctctttttttttttttttttttttgagatggagtctccctctgttgcccaggctggagtgcagaggtgtgatctcagctcattgcaacctccacctcccagtttcaagcgattctcctccctcagcctcccgagtagctgggattacaggcacgcaccaccactcccgactaatttttgtatttttagtagagatggggtttcaccgtgttgccaggctggtctcgaactcctgacctcaggtgatccacccgccttggcctcccaaagtgttgggattacaggcaggagccaccgcgcccggctttctttcctgtttttgtccacccttgactctgtgctcccctctcaccatctctctctctgtcccacatccctgtctgcctgtgtctctgtccatctctcccacagcctgaagactaagaagtgggtgaatgaggtcaggtgaggaggggtctagcttggggtcccctgccccagttccactcccatgccctctgcctgccccctgggagctctcccggcccccccggccctcagctccccttccctgcctgcatggccccacagatacggaggcttctcgctggggggccgagacccaggcctgccctcgggccaagagttgggccgctcagtggaggagttgtgggcgctgctgagtcccctgcctggcggggccctcgaccgtgtcctgaaaaacctcacagcctgggctcacagcctggatgctcaggacagtctcaaggtgggaactgggggggcaggtgggcgtcctgtcacagcaaggtccaaccccattgctctgaccctatgaccttgacccccacccagatctggttcaacaacaaaggctggcactccatggtggcctttgtcaaccgagccagcaacgcaatcctccgtgctcacctgcccccaggcccggcccgccacgcccacagcatcaccacactcaaccaccccttgaacctcaccaaggagcagctgtctgagggtgcactgtgagtccctccaccctgcatgtcctaccctgcacgtcctaccctgcctccatttctctgtcgtttggggtggtgggagctggatttgaaccctgacacactcttgctttataaatgggggatagaaactgttcctctgctccctaagccagggaaatgggacctcctcagactcagcgggccccagcctcccccacacatcctcatcccaccaacctttatcctgcctgagacctgtacaacctctgctgccaaatcccaggcaccctcatccctaaattgcccctgccatctctgccactgctgactgccccatagacctttgtcccatcaatggcgtgttcagctctgctctgagcaacccatgcaccctcaccctacaacagctctcatgtcttcacctccaggatggcctcctcggtggacgtcctcgtctccatctgtgtggtctttgccatgtcctttgtcccggccagcttcactcttgtcctcattgaggagcgagtcacccgagccaagcacctgcagctcatggggggcctgtcccccaccctctactggcttggcaactttctctgggacatggtgcgggggctgcttggacgggtgggggcccagccactgcttgccactgccctgtctggccccttgtaggcaggggcttgtccaagatggcctgggtaaagtcttgaggattgtgggagactttgtgccttcctactcaaaaagcaaggaggtcagggtgggaacagggctgagggtggcagtgcccacctctttaggctgataaaggtaactgccatctccaatgcagtgtaactacttggtgccagcatgcatcgtggtgctcatctttctggccttccagcagagggcatatgtggcccctgccaacctgcctgctctcctgctgttgctactactgtatgggtgaggcccccagtccctcagggcctattcttactgaccccttactgccttccacattaatgctgctgagatagaactctgcagtgactcccaaggagaggatatggaggtctgaggtgatgccgtgtgtgatccaattcagtggtgtgccaaggtggccttaaaagctcatcttatcctgactcatattagtagagttctaaggcagcccatgcctgtaattccagtactttgggaggccgaggcaggaggactgcttgtggccaggagtttgagaccagcctgggaaacatagagagacccacctctaaaaaagaaagaaagagagagaaagagaaagagagaaagaaaaaaaaaaaaacagaaatgtgctttgggtgaaaatgtcaaggtctaaggcagagaagatgggaatggagatttttattcctctcagggcttctcagtctgagtggttactccagtgactcctattgtcccttcagctggtcgatcacaccgctcatgtacccagcctccttcttcttctccgtgcccagcacagcctatgtggtgctcacctgcataaacctctttattggcatcaatggaagcatggccacctttgtgcttgagctcttctctgatcaggtggggcaccacgaggctggggcttgggctgggttgggtcgttggactcagcccctgaccaacatccgtctcccacccttgagcagaagctgcaggaggtgagccggatcttgaaacaggtcttccttatcttcccccacttctgcttgggccgggggctcattgacatggtgcggaaccaggccatggctgatgcctttgagcgcttgggtgagaacttcctgtcaggtggggccatggctacagatagctagcacccttggagacctagagttaattatacagagtggagaaaaacagccccccagggagacagccagggttcttaggtggccctaaggttgggccaagttggaggtacaagaaagcagccataaaaagctaattcttagattacatcacaagaggcctcttctgttttctatgccaattagactccagctgagtggcctatccaatttgtgttcctttcccttaagaatccagagtgacatggatggagaaagggccagaaaccaagactctcatggacccagtccctcctttctatatccacaggagacaggcagttccagtcacccctgcgctgggaggtggtcggcaagaacctcttggccatggtgatacaggggcccctcttccttctcttcacactactgctgcagcaccgaagccaactcctgccacagttagtgaggtctatggagagggtggcaggggccaaggacctactttaagcccacagatattctgtccccaggcccagggtgaggtctctgccactcctgggagaggaggacgaggatgtagcccgtgaacgggagcgggtggtccaaggagccacccagggggatgtgttggtgctgaggaacttgaccaaggtaggtgtggtcaggtcgactgctgggtggggggtgctcccactggcccactcacctttctgaaagacctgcactctcccaggtataccgtgggcagaggatgccagctgttgaccgcttgtgcctggggattccccctggtgaggtgagtccaggggtggaggccaggtgcagggacagtgagtggctgccctactgcatgccctgcccatcatcctttactgaacacctactgtgtatccaccaccttttattgggcacctactgtatgccaatatttgtgctcctatttttattttattatattattatttatttatttatttatttatttatttatttgagatggagtctcactctgtctcccaggctggagtgcagtggtgggatctcagctcactgcaagctccacctcccgggttcatgccattctcctgcctcagcctcccgagtagctgggactgcaggcgcccaccaccacgcccggctaatttttttgtatttttagcagagacggggtttcaccgtgttagccaggatggtctccatctcctgacctcgtgatccacccgcctcagcctcccagagtgctgggattacaagcgtgagccaccacacctgccctattttatctttttttagagacggagtctcactctgtcgcccaggctggagtgcagtggtgagatctcggctcactacaagctccacctcccgggttcacaccattttcctgcctcagcctcccaggtagctgggactgcaggcgcctgccatcacgcctggctaatttttgtatttttagtagagacagggcttcaccatattagccaggatggtctcgatctcctgacctcatgatccacccgcctcagcctcccaaagtgctgggattacaggcgtgagccactgcgtctggcctgtgcatttatcttgagccaacaaaacctcattaagcacctactgcatgcttacctctgttaaacacacactgtgctcactaaagaggtgtactgaatacttttgtgtccatcaacgtttatcaaataccaatagaatttattggacccctattgtatacacatctacatcaagcacttgctcacagccagcatttatcaggcacctgctttgtaccagttcacattcaagcacctactatatacaaatgtatttgctgtgtgccacttattggccacctactagggctggtacacatctgcaaacaagtgctgtttgttagcacacattgcagtatatatatatatttttttttctttttttttcttttgagatggagtctcactgtcacccagcttggtgtgcaatggtgtaatcttggctcacggtaacctccgcctcccaggttcaagcgattctccagcctcagcctcccgagtagctgggaccacaggcacatgccgccatgcccagctgattttgtatttttagtagagacggggtttcaccatgttggccaggctggtcttgcactcctgacctcaaatgatccacccaccttggcctccgaaagttctgggatcacatgtgtgagccaccatgcccggcctttgtttttttctttttttttttttttgagacaaagtctcgctctgccacccaggctggagtgcagtgtcacgatctcggctcactgcaacctctgcctcccaggttcaggcgattctcctgcctcagcctcctgagtagctgggattacaggcgcccgccaccacaaccggctaatttttgtatttttagtagagatggggtttcacaatgttggtcaggctgatcttgaactcttgacctcaggtgatctgcccacctcggcttcccaaagtgctggggttacaggtgtgagccactgggcctggcccacagtatatctttactaagcacctactgtgtgctggccaacctctctaccttgggctgactgtgcacctagcctaagtacacacagtgtgccaggaaacatatggagagctcatgccctgatatttgttgagcactgctgcacacgacctttatagggtacccactgtgtgccaaaagccattccctgctaagtgacagctttatgcctcgctacataccccaatatctgcctagctcccccggggccccacccacggccttccatgtggacactcagaaatcagaggtgctgaggccaggcgtggtggctcacagctgtaaccccagcactttgggaggccaaggcaggaggatcacttgaggtcaggagttcgagaccagcctggccaacatgccaaaaccccgtctctactaaaaatacaaaaattagccgggcttggtggcacacgcctgtagtcccagctactccggagcctgagacaggagaattgcttgaacccaggaggtggaggttgcagtgggccaagatcgtgccattgcgccggggtgacacagcaaggctccgtctcaaaaaaaaaaaaaaaaaaaaaagaggctgggtgccgtggctcacgcctgtaatcccagcactttaggagttcaaggcaggcggatcacaaggtcaagagatcgagaccatcctggccaacacggtgaaaccccatctctactaaaaaaaaatacaaaaattagctgggcatggtggcaggcgtctgtagccccagctacttgggaggctaaggcaggagaattgcttgaacccgggaggcagaggttgcagtgagccaagatcgcaccactgcagtccagcctgggaaacaagagcaaaacttggtctcaaaaaaaaaaaaaaaagaaatcagagatgccggaaccagggcctggggcctcactgagcaccatctgtgggcatccctgtagtgttttgggctgctgggtgtgaatggagcagggaagacgtccacgtttcgcatggtgacgggggacacattggccagcaggggcgaggctgtgctggcaggccacaggtgaggggtgccaggtagggtcagggtggggcagggttggccctgacgtccttgtgcttccccacccctccacctccagtgaatggactgggctcactgccccacacctgcatggtctctgagacccctgcacctctacctcccacacgcggaccaggccctgagacacccctgtcccttatcagcgtggccctggatgggtgggccctgagacccctgtgttagccaccagtatggtcagggactagccagctctctgagcccccggcgcccccatccccagcgtggcccgggaacccagtgctgcgcacctcagcatgggatactgccctcaatccgatgccatctttgagctgctgacgggccgcgagcacctggagctgcttgcgcgcctgcgcggtgtcccggaggcccaggttgcccaggtgagcccactttgtccccaccgctctcacctcccagggcccacccgacccaggccgtgcctctaaagcctggcccaatcccgcactctctcgccttggctccatccctgtccctgcccccagaccgtgcttccttcccctatacctctgtcccccatcctggtccaatagggatgtggctagcccgcctctttgccccgcaacaccaagttccaccattctcattggtccacccacccttccttccgctgcacgttgcccctctctccttgactctgccttctgtggccctgcccacttgctcctcttctgcctaccccctagggcttcgcgcctttctcgctggggtcacggtcacattctcactctggccgttcccagtttgcagccgtttcactgcctcttccatctgcttgggggtcttgtctttgccctggcccgccccaccctcacactgtcccaccccatgccctttctggccctgcctcatacccatgttggctccacccacaccatggccctgctccatacccatcccagctccacccataccaaggccccaccccatactcatgctggctccacccacaccatggccccgccccatactcatgctggctccacccacaccatggccccgccccatactcatgctggctccacccacaccatggccccgccccatactcatgctggctccacccacaccatggccccaccccatactcatgctgtctccacccacaccatggccctgccccatactcatgctggctctacccacaccatggccccgccgcatactcatgctggctccaccagtgtggccccgccccatactcatgctggctccacccacaccatggccccgccccatactcatgctggctccaccagtgtggccccgccccatactcatgctgtctccacccacaccatggccccgccccatactcatgctggctccacccacactatggccctgccccacacccatcccagctccacccacaccatggccccgccccatactcatgctggctccacccacaccatggccccgccccatactcatgctgcccccaccacactatgtcccattctcacatttgccctgccccatgcccattatgcccctgctccacactcaatgctggccccgccacactgtggccctgccccatactcatcaatatgagtccccatgcctactctggccccaccccacagaccgctggctcgggcctggcgcgtctgggactctcatggtacgcagaccggcctgcaggcacctacagcggagggaacaaacgcaagctggcgacggccctggcgctggttggggacccagccgtggtgtttctggtgcgtgggagcggtgcctgggtggggtggggcctgcgacggaggcggggccttgcttatgggatcttccgtgctccccaggacgagccgaccacaggcatggaccccagcgcgcggcgcttcctttggaacagccttttggccgtggtgcgggagggccgttcagtgatgctcacctcccataggtgggccgggctctgatgccctgggctgtggttaaggtgatccaggcctggagagagagccccaaagcacaaggccacaggggatggggggtcctggccctagtggggcgagggcgccaggccccggggtgtaaggacacacagaggtgggacgcggcgccgggatcagaacggtctggggaagagtggggagatgtccacaccagaagggtggcccaggccgggggaagcaggcagtgtggcgccaggcacaggtggccccggcctcacggagctcgtggtgccgggtcccgacagcatggaggagtgtgaagcgctctgctcgcgcctggccatcatggtgaatgggcggttccgctgcctgggcagcccgcaacatctcaagggcaggtgagccggcgcggcctccaggcaggtgtggggtgagggtgggcacgtaggtaggctcaggggagaggccagacgtagagccgggtgaggaaagtttggctccaactggagagatggccaaggctttagattgtcctgcaggggtgactgagggggcgagacaggctggggtgtgctgggggcgcaggaccaggaggcgtgagccgggggctctgggtggatttagaagacacaatcaggtgtgcgttggagtaggtgcagcctggagaggtgagggtggattgatgggtggagttaggggagggcctggttagtgggcggggccataggaaagtggggcgggggtatttattgtgtgggcgggggtagagtgcaagggcgaaagaggagtgtccgaaaaaggagtcaagtggggtgatagcttcgagagcaacctgggcaacctagggagaccccatctctataaaaaatttaaaaattagctggacatggtggtgtgtgcctgtggtctcagctacgcgggcggggggtggcgggggactgagacgggaggaccacttgatcgctagggtagtacaagtatggggcggggccagagagtattaggggctggagggtgagctgaggtgggacctgggaaaggcccgatccggtagccctggccccactcactgcagattcgcggcgggtcacacactgaccctgcgggtgcccgccgcaaggtcccagccggcagcggccttcgtggcggccgagttccctggggcggagctgcgcgaggcacatggaggccgcctgcgcttccagctgccgccgggagggcgctgcgccctggcgcgcgtctttggagagctggcggtgcacggcgcagagcacggcgtggaggacttttccgtgagccagacgatgctggaggaggtgatcacggcgccggggtcgggctgggggaggcaggctgggggccaggcccgtgggctgaccgtccctcttgtcccctctgggctgcccaccgctaggtattcttgtacttctccaaggaccaggggaaggacgaggacaccgaagagcagaaggaggcaggagtgggagtggaccccgcgccaggcctgcagcaccccaaacgcgtcagccagttcctcgatgaccctagcactgccgagactgtgctctgagcctccctcccctgcggggccgcggggaggccctgggaatggcaagggcaaggtagagtgcctaggagccctggactcaggctggcagaggggctggtgccctggagaaaataaagagaaggctggagagaagccgtggtggtgaaaccgtgtgcatgtgtgtccttgagccaggctgcacacatgtccacacagctgcctgcacatgcgtctggatatggctggccccttgcaagctgagtgtgcacatacgggccaagtggcgattcataggacacaggtgtgagcgtgcctacagctgaccggatcccagctgtaaatgcctctgtggccagcccaggagttggggatgtgagtgcgggcctcataagggcctggtcacaccgtccctgtccccacgtccctgcgtgcctatgtggggctggcgcctaagggcggtacctgtaagtgcctggccataaagtggggatgaggtcaggactcaggaatgtcctgggaagcttacaggagcccggtgtcccggagcacaggccagggccgggccagaagcccatccgacatccagctgaccctcaccctctgaccccagccctcagcgccatgagtcgggggcaaagagttctcaagggtctgctgggctgggtttgcacttggacctgggcctggagagccagacttggagcaaggggctgtggccttcatgtcctgtgccccagagatctgcccctcccacccgaggtaggtgggaatggggtttgggaaaggaaagaggttggggttttgggattgggggtggggttctggaaggggacagcagggagacttggggaggggggagagagttcacactgcggggtgggggttgggggaaggtaggaggctgggatctgtatgcctgcagatgccccagctcttggccaatgccgcctcaggctgttatcagcaacgggtgcctgcgtcctgctgcccagcacgtccggtggtccagagtcactggaatgcagcttgggaggcggggctggggaccttagctaagggcaggtctggggcaacatgatatggcccacagggctgctgagaggtaaccaggtgtcctcagcatattctgccgatggtggggtccacaccacactttggggacccctgtgcaggcagcccaggaccaggtggacgtggggacccagacggacgtggggacccagacggacagggcccggtaacctggattgttctgacttcctggacgtctttgcccccagggtttcggttctgggcctcagtttccccacctgtcctcgacctgacccacttcacggggctgcagggcgggtgatgggggggaccctactctgcccggccctgctggggcccggccacaccctagggtctgcaggagaggcggtggagcgggcttgccttcagggaaaagggggctgcaggggcgcagcttcggcctgtgcgtgtgtctggggtctgagggcgaggctccaggggcttggtggcgtctgagcgcgtgtggaggtccgggtctctgcgtgtcatcgtgcacgtgtctgtgcacgcccactcgcgtccgggagtgagagtcagcgccctgcagtcggccgccccgtgcccgccagcgtcaggcaggggctcccggtcccaccccgcgagcggcgcggctccgagctcccgaaggcggaagcggggggcgcggcccggggctgggggcggggcctgcgacctcaccttcgcgcccactccgcagagccgcaggctgaggccgggaagggtcgggggcgaggccgcgtcgccgcctccccgaagccttttcctgttggggggagggcccgccagtgacggccgggcctgtcacgtgggcctgacagctggggagggggtggccggcgacaatgtggtcccgaagcggccagcgccgggagctgcagcgctgagacccccagcccgccccctcgggctcccggccggggccccatcatgttctccaggaagaaacgagagctcatgaaaaccccttccatctcgaaaaagaaccgcgcgggaagccccagcccgcagccctcgggggtgagtggagcccgggtgagacccggagctgacgccgggccgcagggggacagggacccgccctgtgctcggggctcatgctggggcggcggctgggggctcgtgccagctacagcccctaccgggcgggacggcaggggccacagcagagaggccgggaccccggcattcagctcacggtagggaccctgggagtggtggccgcctccctccactccatccagggctggccgcggggcccagggagcaggaagggagggtgccgggttgggacgatgttgtgtttgggccgctgcaggttgggggcttaggcaatctgggggctctaggggccgttgagatgggagggctgtggcctggccattgggctgaaggttgaccgggcagcagatcctctaatgggatccaccaggttcagaggttggggagtgtccccaggcctggggtgtctacaaagctggggggggggtctacagagcttgggggtccgggatgtctacaaggcctggggctgcccataggctctggggttccatggacctttaggggacagacagagtcagaagtgtgttcacttaaagcacctgcgttgtaggagcctgaggggggcttgaagggctgaggaccctccccacccccaccaggaagtggggacccccctcccgcgcctccccgcaggccccgccccggctgtggtttgggcaaggaccgttgtttgtgaaagctctagggaagaggatgttgggtaacaggtgggggggtacactaccaaatctcggccctgtgacctctggcctttgacccctgtggggtcagggtgatggtggccctccacagccccacttcatttctggggaaactgaggccgtgtccaggccggaaaatccctttaacgagctcccctcggacctgcccaaggagctgcccaggaaggatggggctgacgcggtgttccccggaccaagcctggagccgcccgctgggtcctccggcgtcaaggccacagggaccctcaagcggcccaccagcctgagccgccacgccagcgcggctggcttccccctgtcgggtgctgcctcctggacactgggccggagccaccggagcccactgacagccgccagcccgggcgagctgcccaccgagggtgccggcccggacgtcgtcgaggacatctcccatctgctggcggacgtggcccgcttcgctgagggccttgagaaacttaaggagtgtgtgttgcgtgacggtgagagccacggggacaccgaggcctgggtggaagacagagccagacccaagggaggatggagggagggacttggggaggctcagaagggagggaggctcagatggcagggagggctgtgtggaagaggccatgacagctaaggctctgagggatgtgtaggagtttggtgggggagtccctgagcgtacactggctcaagagggtgcccactttattttttttaaaggatctgatggcaattaggagggaaaggcagaggaaatgtcccatgcacaggctcagaaacacggaaacagagaatgcatttgggggccaaggtgtggggtgccgctggtgtaggatgaaggcatgacaacgccaggcagaagggcaatggggagccatagaaggtgttagagcacaggacagatgggggcagatctgtgtcttggaatgaagcaaactgggggttggctgaggtctgggtggagagagattcaggaggcatggcgaggggcaggatggggtcatcaggcggcggaggtgctgggacccagcggcctgcaggccggcagttccgttttctcctccacgcggccgctgacagccctgcttcctgccgagttattttcatctgcttcctgtttgtccctggcagcccaggcgggcacctcatgtgctgccttcagcccccggctcctcccagaaaccacagtgccagggtcatgccaggcgctctgatctgctcccagcagccgcccattttacagatgacgaaactaagtctctagtgaggccctgacccctggctcacccagccagggcagggcagagccaggactggacctcaagtggtggagtggcctctgcaccttcagggcactagttggggaaggcccggtccccactgggaggagtgggagcccccgggttatctggtcccaggggcgggggctaggctgctttcctggggaaaccctaatctcggttcctttccgatcctggcgcttccttggaggcctggcctgggcggggctcagctcccaggctcctgcaggaggtctgaactgggccagccagggtggggcacttttttttttttttttttgatacagggtcttgctctgttgcccaggctggagtccagtggtgtgattgaggctcactgttaccttgaactcctgggctcaagccatcctcctacctctgcctcccgagtacctgagactacaggcatgagccactgcacctgatttattttattttatttattttatttgagatggtgagatggagtctcactctgtcgcccaggctggagtgcagtggcgcgatctcggctcattgcaaccttcctctctcgggttcaagtgattcttctgcctcaggctcccgagtagctaggactacaggtgcgtgccaccacacctggctaatttttgtatttttagtagagatggggtttcaccatattggccaggttggtctcaaacccctaacctcgtgatccgcatgcctcagcctcccaaagtgctgggattacagcaggcatgagccaccgtgcccgggcttttctttttttctttctttttcttttcttttctttttttttttttttttttgagacagagtctcactctgtcacccaggctggagtgcaggggcgagatctcagctcactgcaacctccacctcctgggttcaagtggttcttctgcctcagcctcccgagtggctgggattgcaggggcgcgccaccgtgcccggctaattttttttctttcttttttttttttttttagtagagatggggtttcaccattttggccaggctggtcttgaactcctgatctcaagtgatccacccacctcggcctcccaaagcgccaggattacaggcgtgagccatcgcgcccggccagtttttgtattttttgtagagaccggggtctccccatattgcgcaggctggtctagaactcccgagctaaaaaccgttctcccggctccgcctcccaaagtgctgggataacaggcctgatccaccgcgcccggctgggggcgccttctgtgcgtctcggggccgccccaggccagagaagaccctggcggctaggatgtgggctctagtcccgatgtttctcagctgctgagaccctggcaagccccttccctctctaggtgtcaggtgacttatctataaaatggggccacctgcatgcagcgatggttgtggggtccaccccacagcttggggacccgcgttcaggcagctaggaggggacccacatggacggtgccaccccgacacttcccgggcttcctcgttcccgggcttcaggtctgggcctcagtttccctgcccgtcctcgaccctccccacctcgaagctctgcggttaaggaaggacccaggctggggcgaacgggaccccagggcggggtttccctcgcgggggcggggcctcctgaccggccggagccggtttggccaccggagacccccatcggtcagctgccaggccccacgcgctcgcggtctccgcgccccgacggctgcgccatgtgtatctgcgggacggcgcacccggtgctggacgagggccccgtgcgctgccgggcgggcccccgaggtgaggggacaggtgccgggcgctgggtcccgccgcgtccgggagcacgtggcgctcgggccgtttgccgcccgcggtgggggagcagcggctgccgcgcgcctggcctggccgtgcgcacctgggcatccctgcgctgcgcaggggtcgcgccggccgccggcttcccgggtagggggtgtgcggggacagccgggggtccgtgcgccggccgcgcgcggagtgccgggtgcccggctggaaggtcccgagaaggggcgtggccggggcctcccagcggcttcccggagctcctggagccccaatcccattcccggagtccgcctcgcatccagcagcgaagacatgttccggtccggggtctcaggcccggcggcggccagcggggtatctctggcgggtgactcggtcggtctcttcccggaggtgacattcacctggggtcttcggtgccgaaagggatggggcacttactttttcagatttcatttcgtatttggggcatcctctgagcggtacagtcaggcgtcaaagctgcccctcccgctggcctctgtcctcccgggtacctttcccctcctacgaattccgtgggtttgtttccactacgtggtgtgtgcctggctctcgatgtttcgcctgtactctctgcttttttcttttctttccttcttttcttttctttccttttctttctttcttttctttcctttctttttgggatggaggagtctcactctgtcacccagctggagtgcagtggcgcgatctcggctcactgcaacctccgcctcccagcttcaagcgattctcctgcctcagcctcccgagtagccggcattacagaggagtgccaccacgctgctactttttgtatttttagtagaggcagggtttcgccatgttggccaggatggtctcaaactcctgacctcaagtgatctgcctgcctcggcctcaccaagtgctgggattacaggcatgaggcactgtgcttggccctctctgcttttttcttcttccaattgagaacgttcgatgagggcatttagctttttattctttattttatttcttacagagacagggtcttactgtattgcccaggctggtcttgaattcctgggctcaacccgtcctcctgcctcagcctcccaaagtgctggggtcacaggtgtaagccaccacccctggctgaggagggcagtgaaagccaggttccaacagtcagatctgacctcctctgttctaacaccttctatggctccctattgccctggagataaagccaggcaggatccctctgcctggcgttctcacgccttcagagctagcgtagatggaaaagctgtgtgattgttgagaaatggcttcccctctctatgcctcagtttcctcacttaggaagggcagagagagacctggacagggctttgagcagtcctgaggagttagggcagggaaggagcctggtgggctgcatggaggaaggggctgcaggactgtagcttgaaggacaagaggcagtttgctttctggagggacaagaaaagagtgttctgagcagcagagtgcctaggccaacgtctggcctttgttgatctggccggtagcccagggagggacagtgccctccccgcggtctcgaaatgagccccaggcatctgccgtcttccacctctgcctcagtttccccatctgggaacaggagctctaaagagggaggaggtggacagactttccctgggactgggccctaccccactgctcactccgactctccccagcagacctccttgaggcccgccgcccgcgggcccacgagtgcctgggtgaggctctgcgtgtcatgcatcagatcatctccaagtacccgctgctgaacaccgtggagacgctcaccgcagccggcaccctcattgccaaggtcaaaggtcagcctgctggaacagggctgcgagggctctctgcctagaagggcatcctggaggaggggatgtttgaagtgggttttgaaggatgcataggagtttgacaggcacaagctccctcctgttccccctgggttaagggctccggtcagttcttgcagggatggtcacctcccagagtgggcccacctccttgtccttatctctgcttcccagccttccattatgagagcaacaatgatctggagaaacaggagttcgagaaggccctggagacgattgctgtggccttcagtagcacgtgagcacgggagcctgtggggcagggcaagggagcgtggggggcccgggtgtctctcgatggtgacctcgctggccctgcagagtgtccgagttcctcatgggtgaagtggacagcagcaccctcctagcagtgcctcctggggactcgagccaggtgagtggggtgggccagggccacctgtgtccagcttctggaggccagccgggttcaggtctgcagggcccagacagtcaccctgcttcccctgtgcgccttggtttccctctctgggggaggcagcaaccgtcccctgaagggtgggcactgcccagggccccgcatggggctggtctcacctgcgtctccgtcctacagtccatggaaagcctgtatggaccgggcagtgagggcacgcctcccagcctggaagactgtgacgccggtaagcccccacccagcggcaggcaggcatttgaggggtgggccattgcgcgggtcgggccaggctgagcaggcccccgttccctgcaggctgcctgcccgccgaggaggtggacgtgctgctacagcgctgtgaggggggcgtggatgccgcactgctgtatgccaagaacatggccaagtacatgaaggacctcatcagctacctggagaagcggacgacgctgggtgagagctggtgtcccagcagggtgggtctggagggagggggttctgggtgagctgggaaggccttgtcccagcacctcacacccctctccggcccgcagagatggagtttgccaagggcctgcagaagatcgctcacaactgcagacagagcgtcatgcaggaggtgggggccccgcgggcacggggcgggggtccctgggcccgggtgtgagtctcagccccatttcaagggcccagggaccaagagcaggggcttcccctctacattaacgggggtggctgcagggaccagggagctggtggctgggggtgctggggccgccctgcctccatccctccccacccagtgagccggtgccccacccacagccccacatgccgctcctgtccatctactcgctggccctggagcaggacctggagttcggccacagcatggtgcaggcggtgggcaccttgcagacccagaccttcatgcaggtgcgtggtgcccgggagggcgggctgggcgggggtgtcaccggggtacccactcacggcccgtctcgccccagcccctgaccctgcggcggcttgaacacgagaagcgcaggaaggagatcaaggaggcctggcaccgtgcccagaggaagctggtgaggcgggcgggcgggggcgggcgggggcgggcagcgggcctcggcgcaggcgcagtcccagccccagccccatagcgagggccctgcggcgagctccgcacacgccccggcctcctgcgcatgcgcggcctcgcaggctgggccgccccccccaacgccaagccgggtcggagatgctccagccccgtcgcccccagctctgcctggaaggacccaggagcccggcgctcactgctgtccctgcagaaatggggagaagccgtgcctccctcggttgtaagcagctggtctccgggttgagggagactgatggtctctcaggactgggaaagcgccatgctcctgcatgtattctttttttttttttttttgatacggagtctcgctctgtcgcccaggctgcaggctggagtgccatggcaccatctaggctttcactgcaacctccatctccctggttcaaacaattctcctgtcgcagcgtcccgagtagctgggattacagaagcacgccaccacacctggctaatttttgtatttttagtagagacggggtttcaccatagtggtcaggctggtctcgaactcctgacctcaggtgatccacccgcgtcggcctcccaaagtgctgagattacagacgtgagccaccgcacccacccggcctcctgcctgtattctcttcccacttcgcttttgggttatttcaaagacgccggcgcctttttgtttgtttctttgcttgttttgagataaggtctcgctctgtcacccaggctggactgcagtgacgcaatcatacctcactgcagacttgccttcttgggctgcaatgatcctcccacctcagcctcctgagttcctgggtctacaggcaccagccatcacacccagttcatttttttgtattttttgtatactcactatgttgcccagtttttgtttgctttttagctgtgttaacacggtctgcagtgaaacgcaccctcctagctccttccagcacataccggcaaacacatatctgccctgttttgtacacacgaggacagctcacctcatgccctgttctgctcctgatttttatcctcacctccatatagagaggctcacccgatatcagtcagcatgaagcagcctgaaccccttttttcggctgtgcagggctcagctgaggagattgagtaggttatttcatggacgtcttgggagtggctgagctgttgctgttacgaacaccattgctatgacaagcttgtgcccctgtctcaaggatgcctgagggatcagtgcccaaaatagaactgctgggtcaaggggcgtgcgtgtatgagctaccctcccaggccacagccctgcttttcctcttctgtgaaccctcagttcttaacctttgcttagttcttatcctttgcttactttgtactggacagtggcttatcattgatttgtcagagctttttacatattagagaacttaggccttaatcatgtgagttttagactccccccattcccctcccacaatttactgtttgacttttgatttttacctgtggcctattttgccaggtagaaacctgtgattgttggcagtagtcttttttttttttttttttttttttttttttgagacaagagcctcactctgttgcccaggctgcagtgcagtggatcgatctcagctcactgcaacctccatctcctgggctcaagcgattcttctgcctcagcctcccaagtagctgggattacaggcgccagccaacatgcctggctaatttttgtatttttagtagagatggggtttcaccaccttggccaggctggtctcgaactcctgacctcaggtaatctgcccaccttgtccttccaaagtgctggaattataggcataagacaccgtgcttggctaatttttatatctttggtagagatggggtttcatcatgttggccaggctggtctcgagtagctaggaccacaggtgtgcgccaccacgtctggctaaattttttaatttttttgtagagatggggtctcactatgttgaccaggctggtctcaaactcctggcctcaagtgatcctcctgcctcggcctcccaaagcactgggagtacaggtgtgacccatggcgcctggcggtctcctagtaattggatgagtccgtttgtttgtgtgcgaatctgatggtgcaggttgtgaggtgtggcccccgagcccacaggtttttgactaagtgctcttcctgccaacctgtgggcgcctggcttcctgcctgggcggcttctctgttctcgtctgtgaggagggaagtgaaagcaaaagagcccggagacgctcccgtgggggctggtgtgcgtgtctgcagaggctgccgtgtgagcctctgtgcagagcttggctgcacctcagcttcccgggctgcagagtgggcacacaggacacccatttctccgagtgtcctgttacgggtgcctcctcccgttcttttttttttttttttttttgagctggaatctctgttgcccaggctggagtgcagtggtgcatgcaatcttggctcactgcaaccttcgcctcctgggttcaagctgttcgcgattctagtgcctcagcctcccgagtagctgggattacaagcgtgcaccacaatgcccggctaattgttttaaattttgggtagatacggggtttcactatgttggccaggctggtctcaaactcctgacctcaagtgatccacctgcctcggcctcccaaagtgctgggattacagacgtgagccaccgcgcccggccactcctcctgtttttccgctgccgattgttgtgcagggtcctctgcatgcccagctgggccatggggccttgctgagagagatgggggtggggaggaaaggaggagctggggagactgagtcccatccgaggatagggttggaactggcctcctggctcccacacccacagcaagaggcggagtccaacctgcgcaaggccaagcagggttacgtgcagcgctgcgaggaccacgacaaggctcgcttcctcgtggccaaggcggaggaggagcaggctggcagcgcgccgggagcaggcagcacggccaccaagaccctggacaagcggcggcggctggaggaggaggccaagaacaaggtgagggcgggtggaggcagggctggaggtccctggaggaggagatccaatgcttggtgtgacatttactacctccagacctttgtttttgtttttttgtttttttgtttgtttttgagacggagtcttgctctgtcgcccaggctggagtgcagtggcacagtctcggctcactgcaagctccgcctcccgggttcacgccattctcctgcctcagcctcccgagtagctgggactacaggcgcccgccaccacgcctggctaattttttgtatttttagtagagacggggtttcactgtgttagccaggatggtctcgatctcctgacctcgtgatccgtccacctcggcctcccaaagtgctgggattataggcatgagccactgcgcccggccaatttgttttttggagacagagtctcattctgttgcccaggctggagtgcagtggtgagatctcactgcaacctccgcctcccaggttcacacagttctctgcctcagccaccctgccaccaagcccagctaatttttttgtatttttagtagacacagagtttcaccatcttggccaggttggtctcaaactcctgacctcatgatccacccacttcggcctcccaaagtgctgggattacaggcatgagccaccgcgcccggccccgatttttaaattattattatttttgagacagtgtcttgttctgtcacccaggctggagtgcagtgacgtgatcatggctcactgcagcctctacctcctgggctcaagcaatcttctcgcctcagcctctagagtagctgggaccacaggcgtgtgccgccacacccagctaatttaaaaaaattcttggccgggcgcagtggctcacgcctgtaatcccagcactttgggaggccgaggcaggtggatcacaaggtcaggagatcaagaccatcctggctaacagggtgaaaccccgtctctactaaaaatacaaaaaattagctgggcgtagtggtgggcgcctgtagtcccagctactcgggaggctgaggcaggaaaatggcatgaacccgggaggtggagcttgcagtgagccgagatcgcgccactgcactccagcctgggcgacagaacgagactctgtctcaaaaaaaaaaaaaaattctttataaagatgggggtctcaggctgagtgtggtggctcacacctgtaatcccagccctttgggaggctgagacgggcagatcatatgaggccaggagttcgaaaccagcctgggcaacatggtgaaacccctgtatctctactaaaattacaaaaaattaaccgggtatggtgggtggggggcacctgtaatccgttacttgggaggctgaggcagaattgcttgaacccggtaggtggaggttgcagtgagctgagatcgtaccactgcactccagcctggcctacagagcaagactccatctcaaaaaaaaaaaaaaaaagatggggagggtctcaccatgttgctcaggctggtctcgaactcctggcctcaagcaagtctcccactgtggcctcccgaggcgctgggatgacaggcgtcagccccgcctccctgaggtttctgtctgagtcctgcaccccgggctgaggcctctctctgtgcgccccgcccccaccgcaggcggaggaagctatggccacctaccgcacctgcgtggccgacgcgaagacgcagaagcaggagctggaggataccaaggtgacggcgctgcggcagatccaggaggtcatccggcagagcgaccaaaccatcaagtcggtgcgtggggtgctccggccgcccgggcggggatggtggaccgggcggcctcctcctgacccctccgctctccggtgccgcccgcaggccacgatctcctactaccagatgatgcatatgcagacggcgccgctgcccgtgcacttccagatgctgtgtgagagcagcaagctgtatgacccaggccagcagtacgcctcccacgtgcgccagctgcagcgggaccaggagcccgatgtgcactacgactttgagccccacgtctccgccaacgcctggtaccgccacccagctgccctgtccccggcgcacaaggccctgcctgggagccgggcttccctctgtcgggggcatgaagatgaagctgtcttgccccccatcacctcccctccttttcccggtttcttccactaggtcccccgtcatgcgtgcccggaagagcagcttcaacgtgagtgatgtggcgcggccggaggctgccgggagccccccagaagaaggcgggtgcactgagggcacacctgccaaggaccacaggggtgagtgtccggcggggcccaggggcggacgctggctccctgcgacccaccctggcccttcaccagagacgcctctttctccagccgggcgaggacaccaggttcacaagtcatggccgctctcgatctcagactcggacagtgggctggaccccggccctggcgcaggtgagggaggctctctggcgggctggggtgtggagctgcctcctctcctgagcctcagggtttcatcacccaccggggtgatggagggggcccccctggctgggggagtctgaacagtcctgattcccgcccaggggactttaagaagttcgagcggacgtcatccagtggtaccatgtcgtccacggaggagctggtggacccagacggtggagccggggcttcagcctttgagcagggtgagggtcccctgacggggctggagagagaggggggtttggacacagtccatgggcctggccctgagctgccttggtgacaccggctgcctgtgctgcccgcagctgacctcaacggcatgacccccgagctgccggtggccgtgcccagtggaccgttccgccacgaggggctgtccaaggcggcccgtactcaccggctccggaagctccgcacgcccgccaagtgccgcgagtgcaacagctacgtctacttccagggtgctgagtgtgaagaggtgagtgggacgccccgacggacagctgggagccttcgggagcctttggggtgcccagcaccgccggcctgtgtgccctcaggaatgtccggcccagagcagggagcagtcggacgcctttggaaggaagcgaacggagggggtggggtgggctcttttagttctggggagcagggttggctctctgaggcagcgaggcagggggcagacctggagggtgaagagtcctggggctgtggccagaagacctggagggcaaaggccctggagctgtgtccagaaaaccaaggggcgggaaggagaggaggccacagggcaggcgggatcacccctggggtggaagccacgagccactgtccagcttgtgtttgcagaagctgccgtgtgggggctgtgagcgccccggggaggtggggtggagccgctgggggctgcgctgagctgggcgccccggggctgggctcactcactctggccgcccccagtgctgcctggcctgccacaagaaatgtctggagacgctggccatacagtgcgggcacaagaagctgcaaggccgcctgcagctgttcggccaggacttcagccacgcggcccgcagcgcccccgacggcgtgcccttcatcgtcaagaagtgcgtctgcgagatcgagcggcgggcgctgcgcaccaaggtgaggcgggggaggaagcggctcacagcgaggaggcgggagtgggccgaggctgatgggcctccccacccccgggctcccgcagggcatctaccgggtcaatggggtaaagacacgcgtggagaagctgtgccaggccttcgagaacggcaaggagctggtcgagctgtcgcaggcctcgccccacgacatcagcaacgtcctcaagctctacctgcgtcaggtgagacccaccggtggtggccaggcagagcctggaaggggcgtagccaggcaggaggaggcggggtgggggtccgggagctggagcaggactgagctggagcaggactggcgcaagcgggggcctggggaggacagggtgggcgggacagtgcctggcagggcagggctgaggctgggggcgtggtcacggtaggagcgaggcggggccagttctgcgccgaggcacggacagggacaggaggggcggggtggggcttggtcagcacgtggcaggggtgtggccacggcagaggcacacctgacgctgtgcgggggcggggccggggccggggctcggtggggcgtggccagagcaagatgggcgtgttcagcgcttggcagggacccgtatgaggctaggggcggggctgaggctagacaagtgcggggctggcggtggggcctgggcttggtggggcgaggctggggccaggggcgtggtcatccccggggaagggcgggactggggctaggggcgtggtcatgtctggggaagggcggagctgggctgggatgggagtgggaccagcacttcgcaggtggttgggaaggggtcagactatgctgagtggagccggagctcgttagggtacctgcagggcggggcgcgcgtggccagagcgagaaagggagtggagctgcgggcgtggcccgggtaggaggggcagggctcacgctgggctgggaaaggggactgacgccgctctgggtggaacccgagctcggtggggtgtggccagtgctctgtgggggtggggctgaggctgggggcgtggcaggcacacgtgggggctgggccaggcccaccaacacctgctgacccttgactctgcgcagcttcccgagccgctcatctccttccgcctctaccacgagctcgtagggctggccaaggacagcctgaaggcagaggccgaggccaaggcggcgtcccggggccggcaggacggctcggagagcgaggcagtggcggtggccctggcaggtcggctgcgggagctcctgcgggacctgccgcctgagaaccgggcctcgctgcagtacctgctgcgtcacctacgcaggtgagtcccggcatatggagtggagggcgcggggtcccgggagccgctcagcacctggcccctgcccaccccgcaggatcgtggaggtggagcaggacaacaagatgacccccgggaacctgggcatcgtgttcgggcccacgctgcttcggccacggcccaccgaggccaccgtgtccctctcctccctggtggattatccccatcaggcccgcgtcatcgagactctcatcgtccactacggcctggtcttcgaggaggagccggaggagacccccgggggccaggtgagggtgtgggcctgaccggggctggccactcggggcttggggagcagggggcgctgctggggacagtcgttgtcggatgaagcccaaggaaccacagggagataatttggtttggacagggctgttcgggaggccactgtctttttgtgtcttttatgcaaaaaactcagcgaggtctgcattgaatctggcagaggtgcaaaggctctgcggccgcccctccactctcccttggggctggccttgggcctcacccttcacccccagcttccttccccgtttcccatcccggtgctgcctgcagccacaagctccacgctggcccggtgtccacagcctgcccgagctgccactgcactccgccgcgaggtcaattccccgcttcagattttcttttctgggagttgtagtttcgctcctgctgcccaggctgaagtgcaatggggcgatctcagcccaccacaacctccgcttcccaggttcaagcgattctcctgcctcagtctcccgcgtagctgggactacaggcgccggccaccacacccggctaatttttgtatttttaacagagatggggtttcactttgttggccaggctggtctcgaactgctgacctcaagtgatccgcaccccccttggcctcctgaagtgctgggattacaggtgtgagccactgcacgcggcgtctcgtattctttcaatccatcttccctgggtgtttaggggctgcggtttctcgggtttgctcttggctgaggacagaccgcctgggcaacagcgggtgtcagtagctgttacgggctgtgtgggtgggtttgttaatttataacatggaaaatggagccccggcccctctatgacttccgttctgcacttgcaggacgagtcatccaaccagcgagctgaggtagtcgtccaggtgccgtacctggaggcgggcgaggcggtggtctacccgctgcaggaggcggcggcggacgggtgcagaggtgagtgtgtggctgcccgaacggccccaagggaggctggcgtgtgccacccatgggcgcaggtgccatgacctagttgtacacacgtggcagggtccacggtgctgcacattctgtggatttcgtctgccacggagaccacacctatgagctactcattcagtgtcctttaaccggctgcaaaaacaggcaaggcagtgccttttgaggtgcctaccccgcactcagaaaccagtaacgtgaacgtggggctgatgccttgtgaggctccaggtgcaccaggtcaggctaagtgcctttcctgcaggagcccgtttttctagagaagggcgtggggctgggagtttgacccacgtggggccagcaccacctgtcagaggcagctggccgagtgccgcatctagttatgggacacctgtgttgtctgtcttcacactgctgataaataaatacctgaggctgggcacggtggctcacgcctgtaatcctcgcactttgggaggacaaggcagatcacttgaggttaggagttcaagaccagcctgaccaacatggtgaaatcccatctctactaaaaatacaaaaattagacaggtgtggtggagggcacctgtaatcccagctactcaggaggctgaagcaggagaatcacttgaaccggggaggcagaggttgcactgagccaagatcatggcactgcactccagcccgggcaagagagagagactctgtctcaaaaagaaatacctgagactgggcaatttacaaaagaaagaggtttaatggagttacagttccatgtagctggggaggcctcacaatcatggcagaaagcaaagaggagcaagtcacatcttgcatggatggtggcaggcaaagggagagcttgtgtccggaaactccagtttttagaccatcagatcttgtgaaacccacgtactatcatgagaacagcccaggaaagacgcacctccaggattcaaccatcctccaccagctccctcccacaacacgtgggaattatgggagctacaagatgaggtttgggtggggacacagagccagaccctatcaacacctctctccttccgtttctccccttgtctctctctcctcctccccgccatgtctctccatctgtctgtccctccccttgtctctcctccatctctcctgtctctccccatctctcctgtctctccatctctctcccccctctcctgtctctccccatctctcctgtctgtccctccccttgtctctcctccatctctcctgtctgtctccccccgccatctgtctccctttcttagaatcccgagttgtgtccaacgattcggactcggacctagaggaggcctccgagctgctgtcctcatcggaggccagtgccctgggccacctcagcttcctggagcagcagcagagcgaggccagcctagaggtggcttctggcagccacagcggcagtgaggagcagctggaggccacagcccgggaggacggggacggggacgaggacggcccggcccagcagctctcaggattcaacaccaaccagtccaacaacgtgctgcaggccccactgccccccatgaggctccgtggcgggcggatgacactgggctcctgcagggaaaggcagccggaattcgtgtgagctggggtggggctgggaccacaggtggcttctctcttgcctgctcctgtccctccagcacgtcccctgcaccacggcatagcttaggtgcgccgtcctggggtcgctgccgagagcgcctggacttcgacgtcccaccagcgggcgcctcctcccagaggcttccaggagcacgagggccttgcggcacaggactgtgccctgtgctgtcccctgcaccccggctcagctgagctggggaacactgctgtcgtgtgaagtcacagtggccttgttggtgcccacagggctgtgtggatggaggaagctgtccctgcccagtgcatcccccaggtcatcacggggacgcaggaggcaggccctgccctgccctctcctcacaggtctgttgcagggactccagaaaccattctgggagccgtggatgggggcggagctggggtttggtgcagtttccagggtgcagtacagcagggcctgaatactggccctggactcccttttccagaacaccaggtgtggccacctggggctcaggtacacagtggggtctctcggaagccaccgtgtggttctttcacaggcacgtttattttgctgaaataaaaagtttttaatcgggtgttttctgtggcagctgcaagcttagaagattttctgtggcagctgcaagcttagaagaaggggccagggaggggacagagagagccccgtggcgtggccctgggcctccccctaggggagggatgtgtgaggaagggaaccccccgccacggggccccgcgaggtgggagcccgggtggtcttcaccacaggctgtgcagacggtcaggcatcgaatgacctcgtcacgtccacctgcagcccagggcagtccaggaaaacgttctcgatgacggacgtatcccccggctctaaggtttcgcacgtcagccccacatggccaccaagcactggaaacgtggcccatgcgcctgtggaactgcatttttttttttttttgagacagggtgtgaccctgtggcccaggctggagtacaggagcacaatcgtagctcactgcagcctcggcctcctgggctcaaatgatcctcccgcctcagcctcccaaagtgttgggattacaggtgtgagccactgtgcccaggtaatcttaaagttttttgtagaggtggggggtttctctgtgttgcccgggctggtcttttaactcctgagctcaagcgatcctccacttcctgggttcaagtgattctcctgccttagctcccaagtagctgggattacaggcatgcaccaccacgcccaggtaatttttgtattttttgcagtgatgggattttgccatgttggtcaggctggtctcgaactcccgacctcaggtgatccgcccacctcggcctcccaaagtgctgggattacaggcgtgagccaccgcgcccggccacctccagaattttctcatcttcccaaactaaaactgtgcacatgacacactctgtcccctccctcctccccagccctgggaacccccatccccacccaactccccagtcccgggaacccccatcctacttccagtctctgacgactctagtgacctcctaggagtgacatcagtgtttgtccctttgggtctggcttgctttggccaagacaattttgaaaaaagtacatttggagagaaggggaagcactgtccccatcacacacacagtccgcggcctggggatctggggaccctgctgcacagaacagtgggcgcgttacagaccaccgaccgcccgagggtgaattacatcttaataaagctactgtgagagaaccacgtggctaggttaaacttgggcaggcgaggccttctgaaatcagacagtaagcaaacggggaagtagagccagatcccaaacgtctgtaagaggaactggccgcaaaccacagctgcacaagccagagaacaactccacaccctcacgggaagggaagagacagacacgctcacgccttacccaggagcacgaagtgggagggcagggcgagggcctggggagacactgacccctgaagccagcgcgaggagggcacacctgccaggctgacctcgtgtgcttggggtgaggcaaggccacctgctggaaaccttgttagtcggcctggtttctgtatcaagcaaatttatttgctcaaaacatctttaccatttgaaaacacccaacctcctacaacaaccgagaactccagagctggcatctcgcaccctggtggcttgagcgcgtgcatggctgtgaatggagtaaagagccgaggccgggcgggggccgccacgcatcagggcccccgagggagggaagacgaggggtggaaggccgagggcccaggaggaagcagtggctggtgggagacccggaccccaaacccccaacagaggggacccagcgtggtctgggtgaagacccggcaccagctgcccccaggtgacctccctctgggggccttgttccttctgaggctgcatctcgcacaaatccacaggtgaatggggcgggctgggccacaggaagcctcaccccaggacgggagaacgtgggtggaggccacctgccttggggagtccagaggagcagcagccgtgagagctgtgggggccggattctggcagggcaggggcgtttgtcctgcagggatgggggtcgctgtgtgtccgcctctaggggctaggaaagggggagagtggtcacacgacaggggcagatccagtatgcccaggacagcacaacgcccaccgaacgtgacggggtgcgggaggcctggcaggaggcggcccaggccgcagtgcagaggccggacggctcccttgtgcccagcggtcacacaggcgtgggcagtagctctgacctcaaaggaaccgtgccagcgtcagaccaggccaagccccacccctgggctgagtgtgaagtggggcggcctgcaggacagcagctcgccatgaccagagtccaggggaagctgggaggctctcgccatgggcagaggctgtcccgctcctgagactccggccagtccctcccaaggtgcccactcagggaagggttggcctgaagctgtgcctcctctctcagctctggggtctctgggcaggtttctaaaccctcttctggaaagtcccgccgcacaactgccctgcaggtgaacgtctcctgcttctaaggtgggtcagcggcggagagacgcacgccccgcgtaccaggactctcccgtccaggcgcacagccccaagagctgcagcctacggtcgggtggggtctgggggtctgggggtgtcctgggagcgcctggtggcccagctgggctggtgctaggagggtcttgctgccggacaaagcaagaacagccctgcacaccgacggaggggacgacacccctgcctctgaccccacctcagtgcctgtccctcggccgtctcacctgtcaggcggtagctactgcaccagccggtaggtgatgtacctgccagccgtctcactgggccggatgatcttcaccacctgcagagacagagagcaggggctgcgaatgcttgaggggtctcactgcagtcaccagacagcaggcgggcagcacacgggctggggatggccggcaggggtccgagatggctgaccctgggctgtgggacccgctccctgggaacctgggtcacgctcttctctgggcccagtggccctggctttaagagggggatattgggggtgtggtctcgaggtcccctccaggccctggatcaagggggaggggctgtcggggagggacagaagcccccttctccgagtggtcagctcagagcagccccagggccccttctccccacagggctcacctgcccacgctttatcccaaagtagcgcgccacagggtcccccgcctggatcctgggcagctggttctctcggagcttactgcgaagcaccgtcaggaaaatgccagacagggccgttgggggggcaggggtgtgtgtggggggggaacgcggaagtctcgagggacagggaggggcggggccggtggggctggaaaggatactatcgggccagcagctctgtcacctcctccttggtcatgacgacgtgctcagggactagctgccgagagaggaagccaccaggcatcaccaagggctggtgagaccccacgtggctcccaggtgccaccacagcccctgcgccttcagacggacaagagccctgaaccccaccccgatccccggcactcagggagcccacccaccccaccctggctccacaggcgggggacggagtcacagctcctggggcttctgaggcagacgggctgggcacagccacctcctgctgggactcctcctgtcccagcactagggtccctccacactcccagcagtcccgattctacaggctggggtgggcccgggatctgcatttttttttttttttttttttttgagatggagtcttgctctgtctcccaggctggagtgcagtggcacaatctcggctccccgagtagctgggactacaggcgctcgccaccacgcctggctaatttttttgtatttttagtagagacggggtttcaccgtgttagccaggatggtctggaactcctgacctcgtgatccgcccgcctcggcctcccaaagtgctgggattacatgtgtgagccaccgcgcccggccgggatctgcatttctaggaagctcccgggttcggctgctgcaggcccagggccaccctttgagaaccctgtcctccatgcactaataggaacacctgccctgggccccagatcccacatcttcctggccacccacaaacgctgcatctctgccggccccacgcaggcgggattccgcggcgcgcgcccacctcgtgctccgtgatgttgatgagcagctcctgctgcagaaactgctccaggatgtacttgggggccatgtcgaccagggactggaagagagcggctctaaggcacggcccggaggggcccagacaaccccaaccccatttcctgcctcaagctacctggggcttactcgtgtgccccaacaacacacccacgtcgtgaatcagaaaaccccaccgccagcccaggagccttcaacagcccgcccctccccagcctctctgctcatcgagagcctcatccagcagtgaagtggccgtggaaactcggatgtgtttccatccatcacacgcttccaggggcggccctcagagctggcagggcgacctcttccccatacaggggtgctgctctgtgtggctgcgtgaaccccacagctggtgggccagggactaaactgctctgctgactgcccgtcacagcacagcagcctggctccagagtgtccgacagacagacggggaacacggataggcccctggaggaccccgtgccgggcctcctctgcaagtccccctggacatcagctcaggataaagaacctccggctcctggaatctgcaccaggccgagggctggagcccacaggagctggcgagaggcacagtgccctccgccctgacgcccctcctgagagctgggggaggacggcggctgcctggggtggggcccatggacgcggtgggagggaggcggtcggggcttgccggacatcccggccacatcctccagggcaccctggctggcctggcccaaagcccaaggcacgtgggccgcctgtgggtactgcttgcgggaggaggctggggagggggagaggctggcggggtggggcaggggtgcccacctgcttggcggagggtgtcatgccctgctgcaccacgatgagagcccgtgtgatgttctcctcctgcatgcgctggcagtacaccttgatggtcttgatgcccaccttgggctcctctgcagacagagagtgtgctggcctgcacgagcctgggccctcgtggccctcgcccacccagagcccagagcacccaggttccagccccattccacacaggtgtctctcctgctcgggcctcggcttccgcgtttgcaaaacgaggcctgagttgcaggatcccaggacaggggaagagagggctgaaacctctcattcacccggagacagggacagggggctgacacccctcagtcacccagagaccagggagaagcagagaccttcgactctgagaggctcccaccctgggcagttctggggaggcgggtgactcagcaccaacctctccaacaagcagacctcacaccccaggacgctctctttaagaagcatcacctgaggccgggtgcggtggctcacacctgtaatcctagcactttgggaggctgaggcaggtggatcacttgaagtcaacagttctaaaccggcctggccaacatggtgaaacccggtctctattaacaatacaggatgggcgcggtggctcgcacctgtaatcccagcactttgggaggtcaaggtgggcagatcacgatgtcaggagatcgagaccaccctggctaacaaggtgaaatcccgtttctactaaaaatacaaaaaattagcccacgcccgcagtcccagctactcgggaggctgaggcaggagaatggcgtgaacccgggaggcagagcttgcagtgggcagagattgcgccactgcactccagcctgggcaacagagcaagactctgtctcaaaaaaattaattaattaattaataaacaatacaaaaagaaaaagtagccaggtgagatggtgtatgcctgtaaacctagctttttgggaggctgaggtggaaggattgtttgaacctgggaggtggaggttgcagtgagctgagattgcgccactgcacactccagcctgggtgacagagggagactcagtctcaaaaaaaaaaaaaaaaaaaaagactgggcgcggtggctcacgcctgtaatcccagcactttgggaggccgaggcgggcggatcacctgagattaggagtttgaaagcagtctagccaacatggtgaaacctcatctctactaaaatgcaaagaaaaactagccaggcgtggtggtgggtgcctgtaatctcagctactcaagctgaggcaggagaatcgcttgaactcaggaggtggaggctgcagcaagccgagatggcaccactgcactccagcctgggcgacagattgagactctttttcaaaaaacaaaaacaaaaaaaaaacaaaaaaacccagcagcgtcaccaggtccggttggcagacgtgctccgtcaccccactgattaattctgggcgtggggctgcgcccctaaggcgcttgcaatcccccaaccgctgagggctttagagccatactagggaggcagacaggtgcggagacttccgcaaagcaggtgctgaaaccgagggtcccaggggtcctgggaaaagaggcccgagcacaagctcgagggacgagtaccggacgctgacaggggagagggggcatggggtgcggaggaatgggctggggcgggcaggggccgcagctcacaaggaggctgcgctgacccagacggggcctcctgggccaggccaagaagctggaagtgcacccaacggccaggatgggggagccaagggacactagggcaaaggacatggggggctgggggtgagtggggaggcccttgtgactctcctcgttggcaggaagagagaaggggactgagagggaaactagaaagaagctgagcatgagaggggtcagagatcaacggcatcacccacagcaaggaaggggaggggagttttcctcccagactgggcagagagacaaatgctgggcaccaggcgagtgggggtgggtgctagcgaccggctcctcggcaggtgctctggtggcttcaccggaactcccccgggacccgctgctcacctggaaagaacacaaacatctggtcggtggggtcatcgttgtgggccaccagcacggtgaggtccgtgcgccgcggccgcccctcactcggcttgtccccagattgggctttgaactcctccagggtctggtcaagctcgtcctgggtcaccagatagccacggtcgtggcacagctgcagagagaaagaaccagctgaccccagggcagagagaggaaggcggccaaagctcgtgacccggaagtcagacctgcggctgctgcagaggacagaggtgaacagcaaacgggatgaacactcactgtgtgctccatgacagccaccccggcccccacagcctcacaccacaggatgggaccagtatgatcctgagaggctcccagagatgtccagccttgaccaagaccgtctgtccacccagcctcacagaaacctggcagggagcaaagccctccaaaccactttgcagagctaccctaaaggcagggacaaaggcggggcgcggaggctcacgcccgtgatcccagtacttagggaggctgaggcaggagggttgctggaggccagttcaaggatgcagtgagctatgattgcaccactgcactgcagcctgggcgacagaatgaaaccctatctcttaaaaaaaaaaaatgacagggaccgaaacagatgtgacttcaggctgacaatgtttgaggatcggagaaagaagaatcaggctgcggggggcttcgctgaggacaagggcaaagggtgggaagcaagacaaagcaaaagctctcaaacggccccaatggctgaggcaataccctgaaccgcaggtcctcaggcctgtgcccggcttccaaaccggactcgacccagtggcctccatctgccccagaccccaaggcacgggttccgagctccacgtccccatcgaaagccccagctcgcccgctgcttcccaaccaccaactctgccagcctcggatgctgaagactccatggggttcaggacgcaaggacaaatagcgacgctgaatcacagagaagggcagagtctgggggcgccccccgtccccattcgcggcttcctcctcctctcgccgccacgcgcgccgcaccagcccaagccgcccacccacccctaagcaccgcacccagacgtctcgaaaccccctcccttccccgctgccggctcaggtcgggtccagcgcctggtatccccggcgacctctgggcctcccgtatcggcccggcccttcatcgctgctgctccgacgagagtacgaggagacgccgtgctcgaccccacctcgggcccctacacccgccgcccgcgcccccgcccccaacaccaggcgcggctcacctgcatgatggtcttgcggattttccagagccggtacgtctcctcctcgtcgtccatggcagcctccgccgccgccgccgctcgcaccccttctccgcgcgagaacccgcgcggactgcgcctgcgccgaatccgaatcaggccccctccgcctaaccccgccccgcgctggtctgtcgtcggcgaatgcctgaatgcagcaacgtctcggatcggcagcgccaagggcagcccgagccttacgagagcggcagttggctgagcgagtctctcgcctccgtagttctcgtgtgtctttggccgcacagcctctcgggagttgtagtttccgttcaactcccaccttggagcaacagtttagaatcccacgaggcgggggcgaagtgtgagcggggaaactgaggcctggatggggtcaaggggcagctcggctcctagggatggtctgggagcctagtgggaactctataaatatttgtgcatcaaactgtacagggtttcctccattggctcctggccaggtcagggttaattcccttgggcctcagtttccctacctgtgcaatggcaataaagtgtccctactttagacggttaactgagagtcttaggcatctctctaggtgcttattaagtcccctcacctctgtcctctcccctgagcgccaccagcctagcctgggtatctccccagcctagcctgggtatctccccaccccagactcttcctgtctttgcaaacctcctcacttccccaggttcacggagaaccccagcccaacacttcctgtgtgcaggctatcagtaacttattcagtgatgcattcgttaattcaacatttactcagcaacctacagtgatggtgaataaaacaggccaagtatcccttgcattcagataaagacaggatttagtaaaatataataaataacgtggccgggcgcggtggctcatgcctataatcccagcactttgggaggctgaggcgggcagagcatgagatcaggagttcaagaccatcctggctaacacggtgaaaccccgtctctactaaaaatacaaaaaattagctgggccaggtggcaggtgcctgtagtctcagctacttaggaggctaaggcaggagaatctcgtgaacctgtaaggtggaggtttcagtgagccaagatcgtgccactgcactccagcctggacaacagagcaagactctgtctcaaaaataaaatgaaatgaaataaaataaaataaataacaacgttagaaagtgacaaagctacggaagaagaaagagcagggaggctaagtgacatggggagaatgggagaactgcagtatcacatggggaggtcagggaatacagtgaggatagattcaagcaaaaatcccattagcagtggtggctcatcactgtaatcccagcactttgggtggccgaggcaggcagagcatgagatcaggagttccagaccagcttggccaacatggtgaaaccctgtctctactaaaaatacaaaaattagccaggtttggtggtgggtgcctgtactcccagttactcgggaggctgaggcaggagaatcacttgaacccgggaggcggaggttgcagtgagccgagatcgcaccactgcactccagcctgggtgacagagcaagactccatcgagaaaaaaaaaaaaaaatcccattgggcgcgatagctcacacctgtaatcccagcactttgggaagctgagaggggaggatccctttgttgtagttttgtaatttttagttgtaagtcacggacttttttacactgatatttgagattctttttggggggctgtcaggggctactttttttttttttcctgacacggaatctcgctctgtcccccaggctggagtgcagtggcaggatctcggctcactgcaagctccacctcccgggttcacgccattcttctgcctcagcctcccgagtagctgggactacaggcacctgccaccacgcccggctaattttttgtatttttagtagagacggggtttcaccgtgttagccaggatggtctccatctcctgccctcatgatccgcccgcctcggcctcccaaagtgctgggattacaggtgtgagccaccccgcccggtctgtgcaggctttcttatctaactacctaacttttctttctcaccttgaggccaggagtttgagacaagcctaggcaacataggaagaccccatttcttttttgttgttgttgttgttttttgagaccgagtctcgctctgttgcccaggctggagtacagtggcataatctcagctcactgcagcctccgcctcctgggtttaaaggattctcctgccttggcctcccgagtagctgggattacaggcgtgagccaccacacctggctaatttttttgtatttttggtagagatggggtttcaccatgttagccaggctggtcttgaacttctgacctcagatcatctgcttgcctcggccttccgaagtgctgagattacaggcgtgagccaccgcacccggccaggaagaccccatttctacaaaaaaatttaaaaattagctgggcgtggtgggcgcacctgtagtcccagttactcgggaggctgaggtgggaagatctaggatcgcctgagcccagcggttgaggctgcagtgagctgtgattgcgccactgcactctagcctgggcgacagagcaagacactgtctccaaacaaacagaaaacaaacaaaaaccagaagaggagagggaggaaacctggggttgcctggggatagctgtatcaggcagacagcacagccaggatagaggctctggggctgtgcctcacctggagtgttcctggcagggaaggggcaggagggggtcagagggcaaggtggggcaggtcccatgaagccttgctggtcagggtaaaatgtctggagctgctgtgttgggaaatgactgttgggagccagggcagaagcaagagaccagggagggagtgggaaggcaaacttgccacaggttggggtggctccaactacggtaggggcaagcacagagcggggagggtgccacagggcgagaaaaagagggagaaagggaacaaagctgtccctgtgagcagtgaaaagaggggtgggagggtggaggcgtgtaggtcgaggtgagctctggagttcagggcaaggtctgggggatggacgtgcaggcagggtggccacgtggtgaagattagagccgggagcctggaccaggtcctgggagcagagcagagtccaggagagtaagtccagccctgctggtgttcagaagcccggagaaggaggggaggcagcagcaggaggggagggaggctcagcacagacactggagcagcccctgagctgcagacctggctgtgtgatctcaggcaggttactcaacctctctgtgcgtcccctctcccctcccttgtaaaacagggacaagaacagcacccacttcgtagggtaattggctaataattgcaatgtacacagagtggcgcctgacaccagcactgcataagtgttccctaaataggataaagggcaggaggttgccaggtctcctggaaacctggtgaggaaggtgtctaggggcagagggaagggagtggctatgtgatgccaccgccaagtcagcctgaggactgagcagggattcgcctagcagacattgcttgtgactcagggaagggggccagtgcctggcaggacggatttgagggaggagaggaattggagatgtggggcagatacatggggcggggagggtcaggagacggacaggcctcaggagtggattttatgacacaagaaagggcatctggagtaaagaccaagcagtgacctgcaaatctgggggcaggggtggactgagaggctgagcccaagccaggggcggcctggatgataacagcaaagccagaggcccggaagtcaggccatgatccacacacagggcaggtgaaaatgtaagatggtgcagccgctatagaaagcagtctggtcggccaggcgcagtggctcacgcctgtaatccaagcgctctgggaggctgaggcaggcggatcaactgaggtcaggggttcgagaccagcctggccaacatagtgaaaccccgtctctactgaaaataccaaaattagccgagcatggtggtgcaggcctgtaatcccagctacttgggaggccgagggaggagaatcgcttgaacctgggaggtggaggttgcagtgagccgagatcgtgccactgcactccagcttgggcaaaaagagtgaaactccatctcaaaaaaaaaaaaacaacaaacagtctggtggatcctcaaactgttacacaaagagtcaccatatgactcagcaattccactcctaggcatacacccaagagaaatgaaaacatacgcccacacaaacacttgtacggctttacaaactcaaaaagagaaaacagcccatagccgggcatggtggcgcatgcctgtaatctcagctattcaggaggctgagaaaggagaattgcttgaacctgggaggcggaggttgcagtgacctgagattgcgccactgcactccagcctgggtaacagagtgagactctgtctcaaaaaaaaaaaccccagatgtccatccacagatgaataaataaacacaatgtgatccctccacacactggaatatttctgagccatgaaaaggaatgatgaggctctgacacaggccacaatgtggatgtagcctgaggacctcatgctcagtgagagaagccaggcacaaaagaacacgcagtgtgtgatcccatttccatgaaatgtccaggacaggccaatccacagagacaggaggggatgtgtgtgtgccaggtcctaggggaggagatggagagtgaaggctgatggggtctgggcttcctttggggacaatgaaaatactctgtgctgggtgcggtggctcacgcctgtaatcccagcactttgggaggcctaggcaggcggatcacctgaggtcgggagtttgagaccagcctgaccaacatggagaaaccctgtctctactaaaaatacaaaactaactgggtgtggtggcgcacgcctgtaatcccagctacttgggaggctgaggcaggagaatcgcttgaacctgggaggtggcagtgcagtgagctgagatcgtgccactgcactccagcctgggcaacaagagcgaaattctgtctcaagagaaaaaaaaaattctggaactagatagatagaggtgatggtctcataacattgtacacgtcctaaaaacactgaattgtacactttgaagtgttaaaatgttgaatttcatatgtattttgtttgaatttcaaaaactttttttttttttgagacagagtcttgctgtatccccccaggctggagtgcagtgacacgaactcggctcactgcaacctccacctccagggttcaagcaattctcctgcctcagcctcctgagtagctgggattacaggagcacggcaccactcccagctaatttttgtatttttagtggagatggggtttccccatgttggtcaggctggtcttgaactcctgacctcgtgatccacccgccttggcctcccaaagtgctgggattacaggcgtgagccattatgcctggccctaatttttgtacttttagtagagacagtttccctatgttggccaggctggcctcaaactcctaacctcaggtgatccgcctgcttcggcctcccaaagtgctgggattacagatgtgagccaccgcacccagccaaaaagttttttttgagacggagagtctcgctctcttgcccaggctggagtgcggtggtgcgatctcggctcactgcaagctccgcctaccgggttcacaccattctcctgcctcagcctcccgagtagtagctgggactacaggagccctcgaccacacctggctaattttttgtaattttagtagagacggggtttcaccgtgttagccaggatggtctcgatctcctgacctcgtgatctgcccgtctcagcctcccaaagtgctgggattacaggtgtgagccaccatgcctggccaaaaagatcttaaaaaagaaatgaagccacaggacagcccctccccagtccttcctggagccaggggctgctctagaaagatatgtggcaacacagcttcctgcagggacactcaagaacttccgccctcacagggctggagccttgagaggtccccgagactccatttccccgttcgtgaaatggggacactctgggaaaagctgtgaagcccccagcacaaatctctcccagagcctggggccccgttctcagatccgaggtcgcgaccccgtgttttccccacttctgactttatcacaattggcaggaagtcaggaatgggatcaagtctctccgcggagctgtgggtgctgagctgtttttctggcaaccctgaaataaactcccatttcagtgcacatgtttgcaacaaacttaaggaaaacaacaccggcaaaattgcgaacagctgagccttcgcaagggcaagaacagagtcaccagtgtggccctgtcacccggcactgccagggcgggaggaaatgggggggtttcctgagaagtcagacaatgggagttgactccaagaactcagcctctaggggctgggcgggagcaaagccatgtgaacagacttatgcaagaccaggattcggccagccctgctcagggatccttgcttcactgcctctgccaccaaaccatccatgacgcctctgtgctgcatctggcaggcctgagtcgggggcagtggcgggggcaggctcatagcaccccccaagtcaacccggccctgagtctgtctctgaagaaatactcagtgcagggtcagaaaaggttaagaccttgaggacaacatacaaatcccaagcacctaggcggggtagagtggctcacacctgtaatcccagcactttgggaggccgaggcaggcggatcacctgaggtcgggagttcgagaccagcctgaccaacatggtgaaagcccgtatctactaaaaacacaaaaattagctgggcgtggtagcacatgcctgtaatcccagctactcaggagactgaggcaggagaatcacttgaacccggaaagcggaggttgcagtgagctgcgatggagccactgcactccagcctgggtgacagaccaagactcctcaaaaaaaaaaaaaaaaatccaaacccctgcctgtacaggggtcaaagtccaatcacggtgactcagttcccaagtatgagatgagtgtttctgttgccacatgtccaagccacgaagtgaaaaacagagttggaagccaagatgtggggcagtatgggctcgggtgtgcccataccttgtaatgttagaagtgtaagaaaaccctccagacttgtgtttattttctgagcacataccgcgcgtccctgcgtgggcagctgcccctgggggtgggagcccaggaaactccaggttctcagttaagtggtaactgtcttgatgactctcaggtctcagtgcccacattatacaagcggctcagcaaccagacccaggatggggagtcactgaccccctgcgcccatggcaggggtgagggtagggacacccccataagatggagctgtgatgagaagcaaacccaactcagtttggtttcatttacattaaaaaggcaaatcccttggccggatgcggtggctcacacctgtaatcccagcactctgggaggcctaggcgggcagatcacctgaggtcaggagttcgagatcagcctggccaacatggtgaaaccccgtctctactaaaaatacaaaaaaattagctgggtgtggtggctcgctcgtgtaatcccagctactcaggaggctgagtcaggagaatcgcttgaacccgggggctgggtggaggttgcagtgagctgagatagcgccactgcactccagcctgggcaaaagagcaaaaaaactgtgtctcggaaaaaaaaaaaaaaaaaaggcaaatcccggccgagcctttggctcacgcatgtgatcccagcacttttgggaagctgaggctggaggatcacttgaggtcagaagtttgagaccagcctaggcaacatagcgagacccccatgtctacaaaacaataattagccaggaatggtggatgagcctgttgtcccagctactcgggaagcagagacgggaggttcgcttgagcctgggaggtcgaggctgcagtgtgccctgatcgtgccactgcacgttagcctgggcaacacagcaagaccccgtgtcttaaaaaaaaaaaggtaaataagagttggggacacttttctgcgagttggagaaaccaaaccccctcgacgagtcttaagtagtattctcaggttgtctggcctgcggccgcgctgctgtcaaccagccggataactgcgctgcctcccgacgcgccgccagccaggccacggcctcctagacacaagcgagcatgcgcagtcgccaacaacaagtccgcacgtccggtcccgcccccccttccccgccttcttcccactccggcctcccattggctgacgtcggcgcgagcgctcaacaccgacgcgtctgaccaatgagcgctctggagggcgtggccgtgggaaaggaggcgcggaaagccgacgcgcgtccattggtcggctggacgaggggaggagccgctggctcccagccccgccgcgatgagcctcggccgcctttgccgcctactgaagccggcgctgctctgtggggctctggccgcgcctggcctggccgggaccatggtgagctagcgccgcggccgttgccggcccggtgaccgttggggcgggcgcgcgatccctgcctccgctcgccggcgtggggaaccctcaggctccagtgaccttggtggggggcgtctgggggctccccctccccacccccggccgggcacggacgcgggtgaccgtactgcgacgcgctccgcggccctccaggccgttgtaggcgcgcgggctggggtcggggaaggggaaggggttgttccacgcgcgcgggtcgtggtcggggaaggggccgtccaggccgttgcaggcgcgcgtgccggggccggggtcgggggtccaggcttgcagggggcggggtccgggacggctggggcggagctggaccgttgagggccacggcggggcgtctccgggccgagcggggctgctgcgcccgagcggttgggggcgcggagggctggaaatcccggatcacgcgcccccgggcgccgccccgcccccgcaccttggcctagcgcggtggcgtcacagtcgcgcagtcctgactacggcctccgggccctttgtccccgctagcggcgctcggggtgggggagccaggaggggcgggagacgggcgggtatgggccgcgcgggcgcaggctcccccgggcgccgcaggcagcggtgccagagccggggcaggcggcggccgcgagcccctcggcggcggaaggccccagcgtgcaggcgcaggagggcgcggcgccggcggaagaagccctgtccccgcagcttgcgaccggagatccacgaatgtcccaagtcccaggacccggtgcgcgcggggcccccacaccggctaatgtggcacattttggggttggaaccctctcccggcctccgggtctccggtaaaaccggaccagaagtacaagggggcgtgtgcgtttaaggaggaggagcgttcaggtcttcagggccgcagggcctcggtgtccccgccaccgacccgctcccgatcccttcctgcctcagggtcccgggctcagcctcccgtccacgctccctgctcagcttcctttgccttgcagtgcgcgtcccgggacgactggcgctgtgcgcgctccatgcacgagttttccgccaaggacatcgacgggcacatggttaacctggacaagtaccggtgggcgctcgcctggggtggggcgcggggtcgggccctgggagggggccgtgttcttctgcgctgacgccgccgatcctcgcaggggcttcgtgtgcatcgtcaccaacgtggcctcccagtgaggcaagaccgaagtaaactacactcagctcgtcgacctgcacgcccgatacgctgagtgtggtttgcggatcctggccttcccgtgtaaccagttcgggaagcaggtgggctgctgcgtccccggggcccgcagaggcgggtgggtgggggtcggggtgggctccagcctggagagggcctgggagtgtgcagggggcccggactgagggggtgccagcccccgactcactcacacaccttggccgccacaggagccagggagtaacgaagagatcaaagagttcgccgcgggctacaacgtcaaattcgatatgttcagcaagatctgcgtgaacggggacgacgcccacccgctgtggaagtggatgaagatccaacccaagggcaagggcatcctgggaaagtgcgtgacctctggggacagtacggctgctggggtgggggtgggggggctgctgggatgctcacacctccctggggcagaatggctcatggctcggggggcggttgcggggaggtgctgggactctcacatcgcgtggcctcctgggggtaagatggctcagggggacatagagggctgtggaggcagccagggatgcccacacctttgtggcctcctggggacaggatggctcgggggcctgtggggggctgttgggactctcacactgcatggcctcctggggtaagatggctctgggggggcttgggggcactgtggctgtggaggcagccggggaagctcacacccttgtggcctcctggagacaggacagcttggggactgtggggggctgctggggacgctcacgtccatgtgcttcttttccagtgccatcaagtggaacttcaccaaggtaagggggctgtggggggtaggggaccagcttcccctggccacagccgtggcccagatgggcagcggacaggaagggcagcctcagccccttgcaggggtggccccacagtttggacaccgtctctccacagttcctcatcgacaagaacggctgcgtggtgaagcgctacggacccatggaggagcccctggtaggtcctctctagggagcccgcttgaggctcgggggcttgggaggtagctgccctaacccagctttcctccccgacaggtgatagagaaggacctgccccactatttctagctccacaagtgtgtggccccgcccgagcccctgcccacgcccttggagccttccaccggcactcatgacggcctgcctgcaaacctgctggtggggcagacccgaaaatccagcgtgcaccccgccggaggaaggtcccatggcctgctgggcttggctcggcgcccccacccctggctaccttgtgggaataaacagacaaattagcctgctggatctttctgcgtaggggcttggggggcccttttgccaggggcccctccatgtcagggccagttgccgtcagctgccaggctgggggtgccatggaggtggcgtgttgttgccccctcttcctccaggctcggggggctgtgctggctgcagtgctggggtgcagtgagatctgggcccgttggacacccagccctggctcttaatccgtgcagccccacctgctgtgcacaggcagggcctggtgtagtgccgagtcttggaggagataattctaagtggctgtgcttcctggccccgggccttaactgttaggaggtggctactggggcctcccctggccaggaagcagaagtgcagaggcccgaggaacagcgtggccctggtgctggggatgggttgggcacccacaccggcccttggggcctcacctggctggggggtgtgggggtggctgggtggttactgtttgcacagagtccctccgtgagggctggggatggacaggccaggaggggctggtagagcagtaccagccaccgttcatgggacccgggggctgtctggacacggcctggctgcccacctgcacagctagagggactgcagcctgccagggtggctgatcccagctgcccccactgggggtctgtggaatggacggtccatggcacctgccccagacactgggttgagaggtctgtctctcccagccctcgtcccctctcatccacatggggccagcacaggcagtgggcagaaaggcctggtaaccaggagagcctggggggatgcccacacacccctgcccttccctccctgtcccacaggctgaggagcagactccgtgggaagtaggcaaaaggcacatatatttaaaaaagtcctttacatatgtacatcagaacttgctataaatacatagaaaccgcaggcgccaccctgccagctccgcggcctggggcctgggagaggtgagcgggcaataacttaggggtcagggaagggctgggggagggagaattgcatatattagcaggggtctgccccacggagcccccgagacgcggggccctgagcacctggggtttcctgagtttctagctcttgggaccacccggtttcacggatttcaagggtttgggcccactgagcccttgtgggtgcccagtcccagagcagccacccggagccccttcctacttgggaggagaggcacagagagggccctgccacgccccggcccccagctgtcctgagtgggccccgccagggctgaccaggtgggggcccgggtcgggcgctgaaggcactgcggccagggcctagggctcctctgagcagtggtcaggggaccttggccctgctccccaccgctgctcctaggggagaaacggtccctgtgtcttggggcatgtttcgcctaaaggcgtgtcagagaggagcctgggcgccggggaagggtgggctgaactggatcacgctctgccgctcgggaccaccgcccgccgcgccccccgcccccgcgccctcccccagcgcgccctcggagggcggccccgcgtgcagcgagcgcagcatgtcctccagcacctccttgaagttgatgtcgcagccctggtgcgcgagggccgcagggtcggcctgggcgtcgggggtgcccagcggcacgacgccggggccggcgtccagggacagcggcgccgggaaagagaagtgcgggggcggcgggaaggcctcggccggggggctgtaggtgaggtccagcacctctccggggccgcaaggcagcgccagcgggcgcggggcgggcggggcggggcagcccagggcgggcgcctgcctgcgcttcacgtccgcatccatcagccgcagctcctgcagcacccggcgcacgcagccctcggggatcttgatgcctgcgggcagagcgtcggggtcagggccggcgctgggggctcgggccttcccggggcgcccgccgcccactcacccacttgcttcttcctgtccttggtcttcagccgcacgatctgcaggtagctgctgctgctgacgtcggccatgacggcggcgatgcggccccacacgcgcagcagcgcgccgcacagcatgtagtggtgccgcagccgcagcccctgcaggcagtccttaccctcctgcgccagccggcagtgccggttcctgcggacgagacgggtcgtctcggctcaggcgggtcccaggggcccgcaggctccccaggtgccctgagatctcccgcctcctctcagggtctcgggagcccccgatccccgcctgggtcgccgccatctgccggtttccccctggtccccggcccgccctcaccaggcgctgtggctgcagtgcgtcagcgacaaagcgtagccactctcccagggctccttggcctcctccgcggtgacctagggacacagggccgcatgagcctgggcggggtcagggccggcaacccgagcgaaagctgcgcccggcggccgcctacccggtggaacttgcggcggaggctgtccagggcctccagctggctctgccggccgatgttgggcttgtacaccgtgaagaactggccgcggttctgctccgccagcaggcagctgggcttgttaccgcggacctgcggaggggggcgttgaggccgcgccccggtccgccccccgcgggccctcctctgggggggtaaccccgcccgaccccaccttgtaggagaggtagaagccgtcataggggcccgtcagcgccagcgacttggcaaaggcgtcctcccacttcaggccgcggtccacgctgatctgccacggcacggggtgggggggtgtgagtgtggtgggggcggggtgggcagagtgtgaggggctgtggggcttcctgctgaccttgtagaagaccacctgcccgtcctgcgggtgcccgggagccaggaacacctgctggctctcctcgtagatctcctcgataccgggagcaaggtctaggggggcgggtggagggtaagtggtgtccaggcctgggactgtgggctggggccagggtcagtcccgtagccggggcgcaccctagagacgaccccccgagagcacaggagagggtgtcctggatcctggcctgacctggcccagcgtggggatggtgcacgtgggccccaacctggcaaccgctcaggtcctaggtaaccccgagcaggctgtgggggatcgtgggagcctgggggccgctcaggtcctatgtaaccccgagcaggctgtgggggatcgtgggagcctgggggccgctcagatcctaggtaaccccaagcaggctgtgaggagattgtaggagcctgggggctgctcaggtgctgggtgaccccaagcaggctgtgggggatcgtgggagcctggttggctgcggcactgctcatgagtgaagtagccatggcccggacccgaccctcatctggacacagggaagtggtcctgatggacaggcctggccccatgaggctggaagcacaggctcgccggcctttcgttcacaacaatgtagcaggtgccccgtgaagcctggggatgagcatggtgggcagcgtgcaccagcctgggcaccttccagagacgtgcacggtgatcccacgagccctgtgcctgcatccgcccagtctcacccagtaccctcgctcacccaggatgcatggcgcttccacgagccccttgcccacctaggccctcgccgtgctcacccacaatgcacggtgttcccacgagccccgagcccacctgggatgcccggcgttcccacgagcccctcgcccacccgggatgcacggtgttcccacgagcccctcgcccacccgggatgcccggtgttcccacgagccccgagcccacccaggatgcatggcgttcccacgagccccgcacccacacccacccacaccacaccccggcacctgtgctcacccaggatgcccatgtcgtatttgccctcccgcttgtccatctcgatgaggtggtcgaaggtgtctgagaagtactggaacagggcgttctgcttgtgcacctccagccccaggatgcggttcaggaacttggtgatggaacagtctggtaggggagggagccaagcctcaggctgcgctgggaatccctctccctgctttgctcaccacccgaggccaaggttgcatgagatgagagacaggagcgcctctgggcctgggtgtggggcactcacccttctccacgtccaggcagccattccgggactcccggccaccaatgcccacagacagcaggccctgcttcatgtctgcggggagaggggcctcacatgctggtcttcccacccctgcccctccctcgaagcccctagctccttttccagagaccagcagctccctggggggctggggagcagctgcagcctagggccagggccagggccaggagcggagccttttgcctgacttacaggagtgagaacagcatgttcttggggagtaaacccaaaccccaggcccctcagctgccctggaaacccacccggcagctgctgggggccgccttggctccctttgccttcacagccctctctgtccgtgtgtggggaggggtcactcaacacacaaccggcctacaaagcctgctgccccagctgctctggagcccagtgctctgcaacccctgcccctcccaggaagacccccaccagcccagcttaccccggaagaaggtggggacccctccagggtatccctggggcacaggcactttgttctcagtctggctcaggatggtggtgaggacacagtgcagggcccgggtgccatactagggggagaaggtgactcggggaggaggcccagggaggaggctggctttccctggacccctgcctccccagaaccccaccctcccctaggcccctggaccctgccctcccctagactcctagaccccacctcccccagctctcagccacctcctccccgggggtcctagactgggtcctcccccagacccctggatgccacctccctgagcccctagaagcccccttcccccctgggggtcctagacccggccctcctccagaccactgagccccacgttctccagcccccatctaccccctcccccaggctcttagatccggccctccctagacccctgcccctgccccgccccccaaccctgccttccctgcagtaccttgttctcaaagttgtacttgctgaggtcacgggactccgtggcgcggcggtctccgtgggtcagggccccctgccaggggtggggaggccatcagttggtcacctggggtctggcctctagcaccccacaaagctttggagagccttcctgggcctgtccctggttctcagccccacccccacctgctcaccagactctccaggcgcttggccacgatggaggcgaaccggcgctccccggccagctccgagatgaggaagacatactctggcgcggagacctggttggaccggtgggtgcggcctgggggcagagctgctctcagggcccggccaggcgggggcggggccgagaccatgttgggggcggggccaggcagcgctgggggcggggccggactcaccgaactgctggatggcgcggtcggcgctccacggcagctccaaggtcatgtgcacgcggcgccgctggttctggacacggcggtcggcttggagggagacacccgagctggaggcctccgagatgatggccacgagctagggggaaagaaggggccgggacacggttggtgcaaggcccgccccagcgttgccgccacctcctcacccactaggcccccgctccaggtcaccaggacgtcccggggcagcgagaggcctgcggggcgcggacaccacccgccacacggccactcgcgcccgcacctggcacacacacactccagaagtgcgcgggtccacagtccccggggacccttgggcccctctgtgcctcttgggtcccgtgggccgcgcccagtgcactgcagccccgcaccttctcgccgctcatgaagcgctgcttctccctgaggttcacgtggtcgatggacagaccctgctctgcccgcgactcgaaggccaccgtcccgtcgggcctggacaccacgcggcctttcctgccggtcatctgcagccgagacagggacaaaaccggccgtcagtgttgtggcctcgcaggagtctggccacccgtgtctcagcttccctatgtcctacagtggtcatgggctcccagctgtgcacgggaggtgggggtgctgggaaagggagggcgggactgctggacccaggcgatgtgtgcctgtccaaggcctggtattatcagccagccggcgccacgaagtgaaaaagtgaagctgggcgggggcagggagtaggaggccgcagaaccaggcccaggggcttgtgtcctggccctgggcaccccaaggggtgcgttcaggcaacgatctaagcagaggcctgcgcaggccaggctgggggatctggggcttagagggatggggcaggccgtccacaggaggtcgtggcctcccgggccgagctggacagcacgctgctgccccagggctccccaaacgccccctcctcgcagggccgcggagacgcagagtgaccagcaggggccaccagagctgcacacagcctgcgtgaagccccacccactgcccatgccccgcccaccacactccagctgccacgtcccacccacctccgccacccgctgggggccgcccagctggtcgatgagctcgtccagggtgttgactggcagttcccggcccagccgccgcactttgtccagcagatcctgcttcagccgctccacccgctccaggaccccggggccatgcgggtctctctgcaggaggcacaggggtcctagggaggaggtggagggtcagggcaggacatgttggctgccttctagggcccacctaactcaaggctggcccctggagggcaaggacaaggggcccggggcaaccctgagggacggcagggtggcggggaagcccggcaccgtggcccaggactgcttttctgcacttgtctccctgagaccagctggggcgagactaagcctcctgtcgcggaccaaacactgtgacctcactgcctccacaggggtagggactgcccagccccaagccccagctctgcctctgaccagtggtataacccctgacctcccctctctgggcctcagtttcccccatctgtaaagtgggcaccatagcagcagctgggctcaggtgggctggactgagggctacaacctggggtgggtggtgaccgccaggaggccgggggagcctcaggctggaatcctgacccagaggtggctgctcagcctggactggaatcctgacccacaggtggctggccagcctgggcaagccctcaccccggtcgtcactggggagcccgactgcatcaacgatgacaacgtcgtcatccaccagggactcgggggaggagttgaagtcgctgtccaggccagggtccgactccgtgctgctgtcgtcactgatgcggatgacgcccgctgtctcgcacgccagccggggggctttggccccgcgtccccgaggtcgccctgcagggaaggacagggtcaccgagggccagaccgcagcaaggtggaggagcaggtggaggagacgcagcaggacagagcaaggccagtggtccgagctggggaggtccatccgagaaccccctgcctctgggcaagcagctcagctgttctccagggacgccctctagggaaccccgtgccctgtggccaggagggtacggtgtggggggccatattttatttatttattttcttttgagacggagtcttactctgtcgccaggctggagaacggtggcatctcactgcactctctgcctcctggattcaagcgattctcctgcctcagcctcctgagtaggtgggattacaggcgcccaccaccacgcctggctaatcttttgtattttagtagagatggggtttcaccatgttggccaggatggtgtcgatctcctgacctcgtgatccacctgcctcagcctcccaaagtgctgggattataggcgtgaaccaccacgcctggcttatttatttatttttgagatggagtttcactctgttgcccaggctggagtgcagtggtgcgatctcagctcactgcaacctccacctcccgggttcaagcaattcccctgcctcagcctcctgagcagctggtattacaagcatgcaccaccacacctggctaatttttctatttttagtagagatggagtttcaccatgttggccaggctggtctcaaactcctggcctcaggtgatttgcccgcctcagccttccaaagtgctgggattacaacaggcgtgacccactgcacctagccaatattttatttttattaatttttttgagacaagagttttttctgtcacccaagttggagtgcagtggcatgatctcggctcactgcaatctccacctctcaggttcaagcgattcccctgcctcagcctcccaagtagctgggattataggcgtccaccaccacgcccagctaatttttgtatttttagtagagacagggtctcaccatgttggccaggctggtcttaaactcctgacctcaggtgatccacccgcctcggcctcccaaagtgctgggattacaggcgtgagccaccacgcccagccaacgggacaatattaataaacccatatccaacgtcctttcaggcctggccagtatggtggacacgcggggtgcctggggaggccacacaccagacttcgacaggcagctctgggcttccctgtgacagaagcctgggggttatcaatgggctccccaagggaccgtggagaccctgaaaacggaaggtgggaggggtctcgctcagcacccgcgtccgtgtcccgccccccgggtctcgctcggcacccacgtctgtgtccttcaggctgtctgttgcttcctcttccctaagcgttccatggcagggtccacgcaagacctgccactggcagcggagccttgagcctgcctggcacggacaggacctgcatttggctgagtggacgggggagtgggggaagcagggagcgaccagccagcccccggggggagaaagcagaggggcaggggtgggtggggccatggggggcagggcttacgtttccgcttgctgcccgctcctctgtcccgctttctcttggtggacggaaagtgcttctgaattagcgacaggaacacgcctctgaaagtgagacgcggagtttattctcacacgaggagctgaggccaggcggggttgctctccaggagctggacgcacccctgggtccctgtgggggtcccggacaggaccgggcctgggcagagggtctcctgtgtggagtgggctggggaggactgggggctgcctgtgagctctcctctggcctcctggtgtcacagggccacctcggccaccaggcttcccccgctctgaggaatgtggccggatatgatgatggctcccaggacaggggcagggggcagggtgaaggggtagctgggggcattggggagctccgacccccaggcaatggggggatctaggggggctgctgtgaccctcccggggcattctcaaccaacaggggagaggctggggcttcagacagctgggagggccagcccctaaaatccacagcccccttgttaaaacggcacagatgcaggaagcctccttctgagacccctggagaccatgtcccaaaccttccaggcccaccatgcctggggtccacctccaagcctctgctttagacctggagcagcggtgaaggcctctgtggctgaggctgggggcccagcaaagcccaccccagcacctcctgctgctggggccaaggggcagggtcaggccacaggtggccacagagaggggtggccatgagcgcaggaagcccacagtcctgtccccaccgtgacacttactcagcggccgagacgaagcagttgaggtgcccatcgttctcccccagcacctcccgcgtgcgcgcctcgcccgtggactgcagcccgatgaccacgcactgtgggacggcagaggactgtgagccaccagccctgctgtggggcctctgtggggccagaacctgccaggcctggggtgatggccacatccctcactctgctgctgtgctcgcctccccaggaggggccacggcccccctacaacacacactgctgggtgggggtctgccggctgcctgtctcgggatggtgagctgcccactgtgtggtcacactccgctgttctgacaccctggctggctctgattggaagacggacatccgggcgtctctcacccaccagggtgcagcccccgcccacgtctggggaggggccaggaaggacctggaagaagagcagcctccgcccctgcaggcccggccgccctcagccctcgaaggccgcagccgctcaccttgtctcgcgccagctcctctcgggccagctccaccagccggcgcaccttggctgcgatgcacagatacttgaagaagcgctggtgtgccgaccagaactggccccacagggacttgcgcgactccaggccgatccagtcggccgcctgctggaacacgttcagggcctcggcccactgcaatgacacgtcacaaggcgcccctgagctgtggctcctggctcccgacccgggccccggcccacctgccgccagccctgggcaaggcatccccacgccaggtggaatttagggcaggatgggggtgctgggggtgtgcactgtaagaggcactgcctctacctgtacggcaaaaacctgaaaaaccaaaacactcgtggtggggaagccgtgctgcaaactgcacagactccgcgcccgcggcaaacaggctcagctccttccaagaacacagggtgctcgcagccacgcctctcttgctttggaccagggtctcacccaggtgtgatcctgtccaggggacactgggcatgtctggggctggctgtggtggtcaggtttgggggctggtcccggcatgactgggtgggctgggttagggtggctgggactctggccacggatgctgctccataccccaaagtgctcaggacggccccaccccggagagcaacccggccctgggggttacgggagatgctggttgtgtcacctaaagaaacgagtgaagaggctgggtgtggtggctcacgcctgtaatcacagcactttgggaggctgaggcggtcagatcgcctgagctcaggagtttgagaccaaccagcctgaccaacatggagaaatcctgtctctaccaaaaatataaaattggccgggctggtggcacatgcctgtaaccccagctacgcgggaggctgaggcaggagaattgcttgaatctggtaggcggaggttgcggtgagccaagatcgtgccattgcactccagcctgggcaacaagagtggaaaccccgtctcaaaaaataaaaaaaaaaaaccatcgaacatacagggctgttgggcgtgagggggagaaaacaggacctgtccaaacatggagggaacgaccaagccacatggcccacagcaatgtggatgctgaacacggctaccaactgccagctgtgggccaggacctgggggcaaagggcttgggcaccacaggaaggggggcggtggtttggtcccatccctcgttatcacagccacataaaaaccccagtgatggccgggcacgtggctcacgcctgtcatcccagcactgtgggaggccgaggcgggcagatcacttgcggtcaggagtttgaaaccaacctggccaacatggagaaacaccgttctctaccaaaaaatacacaaaattagctgggtgtggaggcgggcacctgtaactccagctactcgagaggctgaggggggagaatcgcttaaacccaagaggcagaggttgcagtgaactgagatcacaccacagcactccagcctagatgacagcacgagactgtctcaaaaaaacaacaaaaaaaaaaccccaggacaggacagggcgggccgtcacctgatgacgcctgtggcatctgcaaggccacgggggagcaatttcacccgggaaacgcacaggggtccccgggtcgggtgcgcaggctcaccagcagggccgcgcggttgtagacgcactcgaaggctggggccagcgggatctcctcgatgcggaaggtgacgccggagaagctgagctggcgtgcgatgtacatgccgctgaccttcatgtccatggccacgatctccatggcgccaacgcccctgcggatggacacagcccccgtgagcacggccagagcccgtggggatggagccactcggagcgcgaggcagagccagtcgcagagagggcggggtcggcaggagcagagccctggcggccactgaggcagttggcagctgagcctggcggggacggggcaggaagggctgcggaggggctggcttccctgggagtgctgggcagcccgaggcagtgaaacgagcgacccacattcagcacctctgggtgctggggaagcacacgtggcagtgccaggccttgggctgatgggcctgaggcctcctccccaccccccgccgcccctccacgtgggtgagaagggcactcacctcttctcgatggcgtgcaggaactcctcaaagttccggaagggtgtgccctcgccccagatacccaagcggctcatgtagatcatgttccgaggctcagaggcacctgtggggggaagctgccgtcagctccccaacccgggagggcccagaggccgcgtcaggggacgactaagttgggaccacccgacgaggggccctgcggggttggagccatgggcctgaagagagccagcgtggccttgggacaggcgcagaggtgccccagtgtccgaggaggagcagggtgcagacggaggctgagtacgcgtgtgggataccccttcgcggggacagccaggcagaaagacgctgctgcgggtgggtcacgtgggatccgcaccgccccacctgtggcgctggcgtagaccacgcgggccaggggcagcttgttctgcaggtctagcacagccttgcccatcttggtggagccggcattcttggctttgtgacactcgtcgaacacgatctgaggcacacgtgggttaaggagtattctgaaggacgggggcgaccccaggagcccaggtcctgaccacccaagaccccaccttcctggtggggggcaaacgcctgtgcggctgagaactccacgagggaagcccaggtcggagtggcagccggctaccatggggggcgggcgggcaggcggcccccacacgaccattagatgggtgtggcctgggatggctcctcccagactctaaacaacacacaccgaggatggggcctccggcgaggaagggtgggatccctaaaccatgatatcgcaggacgttgccatcggaggaggatacctggaacctgttttcttttttgtttgtttttttgagacagggtcttgctctgtcacccacgctggagtgcagtgatacaatgtcagctcactgcaacctctgcctctcagattcaagtgattctcctgcttcagcctcccaaggagctgggactacaggtgtgtgccaccaccacaaccggctaatttttgtagttttggtagagacggggttggccgtttggttggccagataatctcaaactcctgacctcaagtgacctgcctgcctcagcctcccaaagtgctgggattacaggtgtgagccgtgcccagccctaattctttgtttttttttgagacgaagtctcgctctgtcactaggctggaatgcagcggcgcgatctcagctcactgcaacctccgactccctggttcaagcgattctcctgcctcagcctcctgagtagctgggattacaagtgtgcgccaccacgcccgggtaatttttgtattttcagtagagacggggtttcaccatattggtcaagacagtctggaactctttttttttttagatgagacacagtctcgctctgtcgcctgggctggagagcagtggggcaatctcggctcactgccacctctgcctcctgggttcaagcgattctcctgcctcagcctcccgggtagctgggattacaggtgcgcaccaccacgcccagctaacttttgtatttttagtacagacgtggtttcaccatgttgtccaggtggtctcgaactcctgacctcgtgattcgcctgcctcggcctcccaaagtgctgggattacaagcgtgagccactgcacccggccaggttcttaatattttaagacgaaagaaagccaagttccaggaaagcagtctgaggaaggaaaactgggagaatacaaattaaacggccggccctgccgccacgtagcagctcagcgaggtatgatctcagggttatcgctatttcgtagattgttgcacatagattgttcagccgggtgcgaagacaccagcagtctcccgttctgtttctggccagtctgaatgttctgtgtctcggcgttaactgaacagcaaagccatggccatgtcctgtgcatgaagtggatgctgcaggccaacgtccctcccttatctgagcctgtgctcccaacaccccaacacccaaggtgcaccctgcagggccgagcaccagggctgagcctggccaaggggtgccctgccgtgcctttgctgctaactgtcctgggtctcctgtgggggagcccctccgaaccgcagcctgccgacgagagccctgggatgctggggagtgaactgtgcccaccacactatcagctggggttggcaccttcctgacttggggagcagctcagtggccaccctctgcccacggcatcatggcaaacatcaggaccacatctatggtcactcatcccacttatcagaaccaagaaaccaagccggagccctgtggtgaatgatgatggtcacttgtgtggtacccacagggccagcctcccaggaccagaaaagtcttctatccggagtcctaaaccctgagcaaagctgggggctgggtggccacatccagggtagtgagctccagtggcctccagcccttccccagccccacccctccgctcctaccctctcccatcctgccctcctctcccctgactcccacccctcctctcccactcctccatcctccttttccctccgaccccctaatccagccctcccctcccgattgcccccagcaggatacgacgccctcgaaggcctccccacaccagtccaggatctgccggaggcgagtgcggtgctggccgccggcctggctctccccaatcagggcggagtaggtggcgaagaggacgccctctgaggtagtggtgtcaccgtacttgatctggggatgcacagaacaggtgtggaatggggccccggctcagcaggctctggacctgggtctccctatctgtaagggtgctgggcagagcctgccctggctgctggcccacccagctgagcagcccccactttgcagggcacggtccccaccttgccccctactttgccgagcacagcccctaccttgctgagcgcgtgcaccgcgatgcccgtggcttcgatgtcccgcaggtcgcgctccgcatcgtacttgaggtcgttggagacgctgaacctgcggggtgggggcgtcaggcgcgcccacccttccccctcgccccccgcttccgccccccacccccgctcccgccccctgccccaggcagggcctcaccacaatgctttcttccggccgcgcaggtggttctccaggatgactccggccaccgtccggcctttgcccacgccggccccatcgccgatgagaaagcccgcgcgctgcccgctggggagcaggacctcgtgttgctgttgccggagagcaggcgtcagggcctgggggtgctggcccggcccctccccaggggcctcgcggacacaggctgggctgggttggggacatgcggtcacctggcaggcgtaggtgatggcctctagctgcagggcagacagggccccgctgtccgagggcagggccagggtgtaggtgatgtctgggggtgggacgctggacagtgtgctggtctccaccacgcggtctgggtgctgcttcccgatcttggctggaggagcaaggacggagggcaaggtaaagggtatggccaaggggtgaccagggccggttatggcacgctgggcgggtctggggcgtggccagagctggcggggcagtttgggggcgtggccaggtcccgttgggcgggtcatgggcgtggccaggaatgcctgggtggaggagtggtcagggctggccgggtcgggggtgtggccgcggcctgctgggttggttgggggcgtggccagcggcttgcaggaggggcaaatgcataaaaatcctcccagtgcctctgaggttcctttccacttctcccctctgcgaaccccggttttgtataagcctggattgtagaacctgtccccgggctctccggccctccctgaagcttcacattccctctgtgggctgtgcgggcggtggtcacctgcagggtctcggtcccacaaaagggtttgaacctgtcccagggctgggtgcagccgggccactcacacttggacggcacgtagtcggcgtaggtctctgtgtgccccagctcctccgcctcctcctcctcagcctcgtcctcctcctctggctggctctgcacactctgctcctgcgtgcgtggcgggagctcagcggagactgcaggcctgagcggccgcgggcactgggctcccccaggggcaggggccaggctgaccatgggcagctgagtgacccaggggtgggagacggctctgtctgcccctgcagcaaggtgctcccccagggcctccatctcctcagctataaaatgggcactcccagcttctaggccagccaagcgctccccacaatggagatgcctgtgctgagccctctccttaggtcccatgagagggcaggggagggagctctcggctgggcccagctcacctggtagctgacgagaagcggggtgctgtgggagggcagaaagtcctcgaagcctgcaaacggcctgctgagctggaacagctggaaggggagcaggatgtcagcccgggccagacgggacaggtcacagctggtgggccctcgcagcctggccaccagagggaggctccccactgccccgtcctcgcctccccatcctcgctccccagggccctgggtcttgctctcctgctgttctcagggtgaccctggtgcctcccaagcctccccagtgggcacctccctggggcctaaggctcgctcctcctggccagcacctggctgccttctcactgatggccagtgtgcctgcctggagtgcccgggaggaaggtgcccggctagttctgacagacaacacagcttggtcccgcgggagctgccaggaaggctgtggacaggggtctgacaggagagacccactgtgtgccagccccatgcagtgcaggaggccctcgggggcctgggagacaaggggttgggagctccctgtcgagggggaagaggagacagaggcagtgggggcgggcgggcctgggccttgtccctcacccgatggctcccagcacacagggtgggtggcccagggcagccctgcactctccaagaacccccgtgggtgcagtccctgaggcccctcgagggcagcacctcctctgtgagagatggggcaaggatgcctgccactgtagtgaccagagaacacatcccactgcggccccaccctggggagaaggactgcccggagcctcatgcagattcaccagggtgggcagtgacactgtcctcggggagctgaccccaggccttggcagacaggtgtgctgggcctctggatgagtctgtggcccacccaggggtctccgaactgactgggcgtgtaaagcctgtgaacgggtgggtcggggggtggtgtggcccgtcgtcatgcccactgtccagacgccaacactgagacagtgtggaccccgggacggatggctgggggatggtagggtccaaactagggtctgtgtgattctggaatatatccactcttaaaaagcaaaaatcctaacagtaatacgagccataaaaaacgtaagcatggtcagggtacagtggctcacacccgtaaatcccagcactttgggaggccaaggcctcccagagtggaggtcaggatttcgagaccagcctggccagcatgctgaaaccccgtctctactaaagatacaaaaaaaaaaaaattagccaggtgtggtggtgggcgcctgtaatctcagctgatcaggaggctgaggcaggagaatcgcttaaacccaggaggcagaggttgcagtgagctgagatcacgccattgtactccagcctgggtgacagggcgagactccatctcaaaaaaaaaaaaaaaaaaaaagtgagcgtgggccgggcatggtggctcacgcctgtaatcccagcacttcgggaggccaagataggtggatcacctgaggttgggagttcaagaccagcctgaccaaaatggataaaccccatctctactaaaaatacaaaattagccaggcacgatggtacatgcctgtaatctcagctactagggaggctgaggaggcaggagaatctcttgaacctgggaggtggagggtgcagtgagctgagatcgcaccactgcactccagcctgggcgacaagagcgagagactctgtcttaaaaaaagaaaaaaaaaagtgtgaagaattggaaaggggagaatcccgccgggtgcgtggctcaggcctgtgggaggcagaggcagaacgggcgagatcttttggggccagggttccagaccagcctggacaacatgataaaatcctatctctacaaaaaatacaaaaattagccaggcgtggtgtcgtgtgtctatggacccagctactcgagaggctgaggcaggaggatcgctttaacccagaaggtcgaggctgaaatgggctgaggttgcgccaccacactccagcctgggcgacagagtgagatcccgtctcaaaataaataagtaaataaataaataagagcatctcttctagacccggtcccccccttgaactccaacgtcctgagacgggtgaggtttccgcccaagcctgcctgagcccgggccgggttctcggcagtgtgtgggagccaccaggctagtgatgctaatgaactgagtccacagcttctgcattttctaacactaggaacactcctgagggtttttaaagaaagtggaagcgtggcacaggaaggttagaaacctatactcagttgccctctccttttttttttaagttaacaaaacacaaaaaaacagacgccacgcaggttcctggaaggctgagtcaccattcccggtggggctggcgggcattgggtttcagatgccctcgtgccggccacagcaggccggtcaggccctggcttctttcctcacgccctgctgaggacctgggagctagctgggagggcacgggccccgggctgggtgaaatgctctgctgggcccttgtgccagagggaccaagcctgagccgcccaccatggctgcggggtgccctgatgcttcctgagccgcccaccgtgagccacccaccgtggctgcggggtgccctgatgcttcctgcctgggcccccaagcccgtgagttctgctgcccgggttgccccttcctgagggcccgggagagcggcctatgggtgtgagcccaccactgtgccgggagcgtgcggaggctggcatgggccctcaccggaaggcgctcagtcccagagacatgtccaacgtctgctcccaaagtctagaagcttctctcgtggacaggcccggattggggaagggacttgccaggcctggctcccagccatgcctccctcaccagacacctccactgagtcgcactggggcacggctagaggctaggcccgaagaacctgggggccctgctgccctacaacccctgctctaggcctggcccacccaggtccttcaggagcttcttggaggcaaaccccagcccctcagcccccacggacaatgtccagctccccaccctgggacaggatccaccaacctcgccctctcagctccccactagcggggacacggccactgctgacccaggcaccatggggctggatgccaccacaggtgctgttcctctgcctggacagccacattgcctgggcccgctgggcgctgcctctccagggggcccttcctgaccacgcttctctgtcccgtcaccttcctgtgcttctctagaccagggactccccgggtgcggtggacacggggcagggtccctctcaggtggggccataatgggcactgcagggcgctgggcagcatcctggccccccccaactccatgccaggagcaccgcccagatgtggtagccacagatgtcctggacgtcgccttctcctattcaggacacaagaggaccctcaactaaccacctcatccatggccacagatggcgccgacagtgacaggcacagccattggcacgcagagtgggggagactgagacctcactggaccgtgtgggtcccgggctggggaggccacgctggtgggtcggggctggctgggggcaccgggcgcactgaccttatcgtgggtggagggggcagggttatcgtcccagatggtggacacctggttgaggctgtcagccggcaggaagtcgggcgtgtccacgatgtccgacagggagtccacggacgaggagaagatggagatgttggagaagtcctcaaaataggaggagtcctggaagacaaggccaggcccggtgagggtggtacgggagacaccaaggcccctccacgcactggagcacgtggggatgggagacaccacggccctccacacactggagcatgtgggaatgggagacaccacggccctcccaggttcaagcaattctcctgcctcatcctcccaagtagcagggattacaggtgtgcgccaccatgcccagctaatttttttgtatttttactagggacggggtttcaccatgttggccagcctggttttgaactcctgacctcaagtgatctgcctgcttcggcatccaaaagtgttgggattacaggcgtgagccaccatgtgacagagcgagagagtgagactccgtctcaaaaaagaaaaaaataaacaagcaatgggtgagaaacaccaaccctcagggccacgcaggacggcgtctgacttctgcagcacctgaagggcagcaatgctgcaggaactctgagcagctcgggtctggggtgagcctggtgccatgccctgtgccggaggcaggggcgggggcagccacgcccagaggtggggctcgccatggggatgacacacacacacgcgctgcccagtgaaggagatgtatgtacatcatttcatttttttttttttgagacggattcttacactgtcgcccgggctggagtgcaatggtgtgatctcgtctcactgcaccctctgcctcccaggtgcaagcgattctcctgcctcagcctcccgagtagctgggattacaggcacgtgccaccacgcccagctaatttttgtatttttagtagagacggggtttcaccgtgttggtcaggctggtctcgaactcctgacctcaggtgatccatccaccttggcctcccaaagtgctgggattacaggcgtgagccaccgtgtccggccacatgtgatgtctcacgcctgtaatcccagcacttggaggccaaggtggaagattgcttgagtccaggagttcaagattcgcctggacaatatggcaaaaccccatttctactaaaaatacaaaaattagctgggtgtggtggtgcatgcccgtagtcccagctactcggggggctgaggcgggaggatcacctgagcccagaggggtcaaggctgcagtgagctgttactgcacaactacattccagcctgggtgacagagcaagactctgtctcaaaaaaaaaaaaaatagactgggcatggtagctcacgcctgtaaccccagcactttgagaagccaaggtgggcagatcacctgaggtcaggagttcaagaccagcctgaccaatatggtaaaaccctgtctttactaaaaacacaaaaattagctgggcatggtggtgcgtgcctgtaatcctagctactcgagaggctggggcaggagaactgcttgaactcaggaggcagaggctgcagtgggctgagatcgtgccattgcactccagtctgggtgacacagggagactccatctcaagaaaaacaaacaaagaaaaaaaccaggcatgtcaagggggcgctgtctctccctggaagctgtgggttccgtccccctcaccttgctcagctttgcccactgcccaccctgtcagacccaagcacctgggcactgatcactagggaccttcaggaacctgcccccaaacagagacccccgggacagaggtgtccatgctgcccgcctgaggcccagagccaggtagggtgcagcaccccccaccccaggagggtaggagcagtccacctcccagagcctctggaggccccgatcggcagggttggggagcattcatcccactgaggcccacgagggccctccggacactgcccacccaggctgcagagggcctggtcacgctgacctgtggcccggaccctccgtggaagcatttcccgggcaaggtcaggggctcctgagttggtcaaggccccagccaggagcgggggtgagttgctatcgggcccagaaccgcccaggccttggtggtgcagggagcgcaggcagagcggaggagagctccccaaacccaaatgcgtgggtcacacggccagtccttccccggagctcagcgtggacagagggaagggacctcaggcagagacacctgccccacgccctcaccaggtgcccttggcccaagaagacaggacaacagggtcctcccgcccagggtcctccacccaaaactcctgccccagtctgaggaaacaccagcccgactactccagggcatccacaccacccgaccagccccaggaccgcccaacgcatctgaaacacgggcctctgagaaaccatcacagcccagaggggcctgaggagacgcctaaacaccacgtggggtcctgggcaggaaaggacatgggggaaactgaggcaatccaagcaaagcgtgggcctcaggagttaacggtggcgtacggatgttggttcatcagccgtgacagccacagacgggagatagaacagcagggagcccgggagtgggtgcacggggactctctgcactgtccctgcagcttttctgtcattctaaaacagtttgaaaagttaaagtcaagtcgggcaggggggagctcacgtctgctactcaggaggctgaggcaggaggatccgttgagcccaggtggtcgaggctgcagtgagctataattgcgccactgcacgccagcctgggagacagagcgagaccctatctcaaaaaaaaagttaaaagtcaagcagggcgtagtggctcatgcctgtaatcctactgttttagagccaaggtgaaagaatcacttgagcccaggagttcaagaccagcctgggcaacacagcaagactccatgtctacagaacgtttaaaaattagctgggcatggcagcatgtgcctgcagtcccagctactcaggaggctgaggtgggaggattgcttcaacccagttggtggaggttgcagggagccgagatcgtgccactgcacaccagcctgggtgacagagcaagtccctgtcacaaaaacaaataaataaaagtgaaagtctaataatgagggagtgcttgcagctttcaggcttcaagaacgcagcctcgaggccccgccctgctccccgtccggtccttcccagcacaggacaccccaccaggtgcatgagccctcgaagccttcacttctagcaggtgccctcagcgattagggacagagggagacggggttcccagggctggccctgttcacatgtgggaagctgaacagagccaggccagctccccccacagtggctccgtcctctgcccacatctggatttgactcctagcagccaccagctcacctcagagacagcctaagtcccacccgcgcctgtgtgtccctccacagcccctccaggccggcccaggctcctgcatccttcaccacatgacccacccaccctccagcctcagctcagcggacccagtgcctccccagggaaccgggcccctctgcagtctgtagtgagggcaagcaccaaggcccctcaagggtgacacttgcatccctccccgccagcccccagttctggggccccagggagggccggggctgcccgctgtggttcttgtctctgtagcatttcaggagccctgggctgaggtggggagctgggaggacctggctgggaggacctggctctgcccgcttcaaaagcagcagacacagctcctcctgccctgggcagccaactccagacctgactccagaactgactccagacctgatgtgctgccgctgccctgtgctccaggacccatggggagccacagagccacagggatttgccggcctgcgccaccagagccagccctgaccaggcccacccagcctccgctccctacaagagccccataagacacccagagcccctccacctgaggcttctccagaggaaagccacagctctgggtcctaccccaggggcagaaggagggggacgcagccctcccgacagccactgccactgtcactgagggcccccgtccgggcagggctgagcccgacccccccactccgctcgggtcccccagcctacgcacagggcgccgctcccagcccgaagtcttaaatctctgcctcggaaccttccggcagattccctctcactgccagaagagacggacggggcggggtggggatttttttagatcctggcggcctcggactctaggatgagatgccggctgctccggcagggggcccggccgtcctgaatggggtcccacctcccagacccctgcccccgagggcctcgcccgccccgggaagggagtgttaccttgttcagagcctcaaactgcagccacagctgcagctgggacatggtcccggcgctcggggggccaggggtcccccaggaagcgctgcccgggagcggctccctcatgaccgcggcagcagccccagcattgggtcggccggggcggacgggggcggctctccgcccggctgcatttgcatgtcggtttagtcaccgccgccggcgcctacttcctctaaggccggggctgactttcaggaaatgatgccggccccgtaagtcagggcaattaccggcagtgcgaggagaattactgtacggggcggatctcccacaggcgctgtcaacacgcaaccccacccgtgccccgccgcaggaccagccccctttggggcacccggcggacgtgcagaatgcccaggtgggcatgggcctcggtctccccagactgcagggagctgggttccgttccacggggaccagctgctgttcctggtgcccccaaaccacaggcagggaaactgcggccaagaccgcctcccttcacccagcaccccacgcatgccaagcgcacctcaggccctgctgcgcccccctggggctctccccaccccacccctgcaggctgaggtccccgagaagcccctgccgccgaagcaaagtcccctccctgctctttccctgctgtccgtgcccagggggttcagcgggccccgtggcctcccttgatctggggctggcggagggagagctgagcctgggcccctcctctccaggctctggccagacccggcctcggccccctgggcaggaacaagtggtagcgtcctgggaaaagaacgttctcgctttggtagaaaaccaagtgtcaatgatgcacttgctggggcaaccccgggccgcgagcccgcccgcggccacactcttgcccgcactgtgaggaccctggcgcatcacaggggcctagacaccgcggggcagacacctgatgggacctcacattgggccacaggcggtcattctcggtgtccttggaggagctggggaggccccagggccagagggggtgggaggacggccgggctgtggagaggacgggccccatctgcctgtactcagcgactgacggggcagaggccgcattgcccacgagaccgcggccgagaccgcgcaggtggccacggctcctcctctgtgaggggaggaagggcccggccctgtggccaggggccctgggaaagaaggaaaccgccccgagaggccaggggagcccgtggctgggccggagggctcgggacagttctgggcttgtaagactcccgccagggctctgaggggagagtgggaccagggggccctcaaaccctgtgcactccgccccctcgggctcaccctgttctagaccctgaggccctgtgccagccccactggggccccgcgaccaggcaccgcagcagcggaggctggtgcagactgtcgcccacaccccttgccacgacccatcacctcctggaggctgggcgacaacacgggtccgtgccgctggggcgaggggcccgcctgccaggcaccccgcccgccaatggaaaacaaccaatggggaagaaacccacggagccgctcaatccggcagccaatcacagccaccgctcaacctagcagccaatcacagccaccgctcaacccagtagccaatcacagccaccgctcaacccagcagccaatcacagccactcccagagacagctccacaccagctccacgcaaaaaacccacaaccacaagcgctgctgaggacgcggggcagtggcctgggaaccatcctgcagctcctcaaaagaggcgaatggggagtaacaacccagcagctgcactcccacgtgccatcaggaggacccacagctcacaaaagcctgaacctacagctcaggagtggacccacagcccacaggacccacagctcaagggtggactcacagctcacaggacccatagctcatgggtggacccacagctcataggcgcctggacccacagctcatgggtggacccacagcccataggacccacagctcacgggtggactcacagctcacgggtggactcacagctcacgggtggactcacagctcacaggtggacccacagctcacaggacctacagctcacgggtggactcacagctcataggcacctggacccacagctcacgggtggactcacagctcacaggacctacagctcacgggtggacccacagctcccgggtggaccctcagctcccaggtggacccacagctcatgacagcctggctcctgcagcgcagtcaccacggaggaacagggccagcacagtgaggccgtccacacactggaacacgacccagccatgaaaaggagcaaggctctgacccaagccacagcacggatgcaccttgaggacctcacactcagtgaaagacgccaaacacagaaggccacgcagtgtgtgaggccatttctatgaaatgtcctgtcctgaacaggaatccacacagacaggaaaagcattcaggttatcagggggtggggatgggctggggagtgacagctgatgggaacggggcttcctgtgggatgatggaatgttctggaactagacagaggtggtggttgcacaactctgtgaatatacttttttaaagtgtggatttgggcccggcacggtggcttacgcctgtaatcccagcactttgggaggccgaggtgggtggatcacgaggtcaggagttcaagaccagcctggccagcatggtgaaaccccgtctctactaaaaatacaaaaattagccaggtgtggtggtgggtacctgcaatcccagctactcgggaggctgaggcaggagaattgcttgaacccgggaggcagaggttacagtgagctgaaatcgtgccactgcactctagcctgggcaacagagcaagactctgtctcaaaaaaaaaaaaaaaaaaaaaaaaggtggatttggccgagcgtagtggctcacacctgccatcccggcactttgggaagctgaggtgggcaaacagcttgagcccaggaagttcaagaccagcctgggcaacatagtgagatcccatctccacaaaaaatacaaaaaccagctgcgcatggtggcgggcacctgtggtcccagctgctcaggaggccatggcaggagaatcacttgagctagagaggtggaagctgcagtaagttatgatcacaccactgcactccagcctgggcaacagagcaaaatactgtctcaaataaataaagtggattttgtggtatgtgaattttgtctcagtttttaaaagacctggaaagcaacgaaacagaaagaacaagcacagactccgacttgctccccaggccccaatgtgacagcacagcccagggtccctggagcaggtcagactgaggataggggtgcgccgcctagggacctgctgggcactaccccacccacctccggcgccccgcgcccagtcctgggctcccgtggcccggtctctccctccgcctctgtccagggtgcacccctcactgaccagtcccgcagcaacgctgaccgagggctccgtgtaagcctggctgaatgcccgctgcctcagccctcacaggaaccctgccctgcattacagggagggaaacaggctacggggatgggaggggctcctcctggagggggctggggggcagacagaagaggcttccaggtggtcgtggggcacaggtggcacttcctagacactgccagtctttggtggctgggagaagggcccctcagcaggcctggtcactagagtgccccgtgcagagctgaactgtgtccccaaaatggtgtgatcatgtcctggcacctggaagctgtgtgtgtggccttatttgggaatccggtccttgcagatgtgagtggttaaaaaaaaaaaggccgcactggccgagcgggtgttctgtgcctggtgtcctcattcgaaggagacacagtcccggggaggaggccacgggacacagaagcagagatcccagccctgcggccacagccaggggatgcccggatcccccagatgctggaggggccggaaggagcgcggccctgtccgcaccttgactttggacttccaggctccagggctgggaggggacagagtcctggcctttgaagctgtgtgtgctgcttcctcacagcagccctgggaggctggcacggctccccaggaaactgggctcccttctgtcagggttccggccaggtgcctggtatgggccctggggccgccgcctcagtgtcttctggtgctgcagccgggcagggccgaaccctggcgcacagcttcctgctgagtctccctctctaaggctgtctgtgggcggctctgccggcccctcctgcacctgcccaggccctgggcggaggctcctcctcccgggggggctgtggcctcagcacagaccaggggacagaaggtggctcttcttggccttggctgggtgtgaaccaaagacttcctgtaagaaatccccctctccctctccctccttcgctccctcatctctctccctcttttttgcccaatgccagtaactgtgggggctccgtggtgccggatgggccgaggcatctgacccctgctgaaacgcatctgcagaacagtcaatgctgcctgcctccctgcctgaaagcagccagagtttgcaaagcgcttttctgagccgtgagctcatcctgagcttcccagaagcccccgggctgccaggcagagagtgttgttaccggacagctgcgttcccaatggtccctgcagccccatggggacccgggatggatgcccggcaggtggagaggtcctcacaggacaggtggtgggcaagggggcagcacctggggaatggggatgggctgtgggtgccgagagccccaggagcccagcagagacgcaagggatctgggtgatgtcaggaagggtgaaggagcacccccaccccaggaacaggcggcaagggatgggcgaggggcagtgaggcgagcaggacctggggaatgtcctgtgtaggggcacaggctggggagaggcttgggctggggtgcggttgggggaggctggcactggggtgcagtggaggagaggctcgggctggggtacagtggggggaggctcaggctggggtgaggctcgggccggggtgcggtggggggaggctcgggccggggtgcggtggggggaggctcgggccggggtgcggtggggggaggctcgggccggggtgcagtggggggaggctcgggccggggtgcggtgaggggaggctcgggccggggtgcggttgggggaggctggcactggggtgcagtggaggagaggctcgggctggggtgcagtggggggaggctcgggctgggggggtgaggctcgggctggggtgcggtggggggaggttcgggctggggtgcggtggggggaggctcgggctggggtgcggtggggggaggctcgggctggggtgcggtggggggaggctcgggctggggtgcagtggggggaggctcgggctggggtgcagtggggggaggctcgggctggggtgcagtggggggaggctcaggctggggggaggctcgggctggggtgcggtggggggaggctcgggctggggtgcggtggggggaggctcgggctggggtgcggtggggggaggctcgggctggggtgcagtggggggaggctcaggctggggggaggctcgggctggggtgcggtggggggaggttcgggctggggtgcggtggggggaggctcgggctggggtgcggtggggggaggctcgggctggggtgcggtggggggaggctcgggctggggtgcagtggggggaggctcgggctggggtgcagtggggggaggctcaggctggggggaggctcgggctggggtgcggtggggggaggctcgggctggggtgcggtggggggaggctcgggctggggtgcggtggggggaggctcgggctggggtgcggtggggggaggctcgggctggggtgcagtggggggaggctcaggctggggggaggctcgggctggggtgcggtggggggaggctcgggctggggtgtggtggggaggagaccagaagaggcaccaggggctgccctgggggacactcaccccacacagaaacaggtgccggagagcctgggggtggggccgcgaggctgggctgggcctggagcaggggacccacgggaggctctgggcacagagggtgggctgcagcagcaagggccccttatcctcgagcaggaacccaacaccccccagccagacccagtcatgcctggaacacacagacatggacctgcatatggacgctgctaacagcgattcacagctgctgtcaacccatacctactcctgggtatgagcccaagagaaacgaaaacgtgtccactgggaagtttgcacccgtgctcacggcggcacaactcacgacggccacgggtggaagcagcacaagcgtccatcacggacacacagacagacacagtggggccctccacgcctccatcacagacagacacagtggggccctccacgcctccatcacagacggacacagtggggccctccacgcctccatcacagacagacacagttggtcctccacgcctccatcacggacagacacagtggggccctccacgcctccatcacggacagacacagttggtcctccacgcctccatcacggacagacacagtggggccctccatgcgtccatcacggacagacacagtgggtcctccacgcgtccatcacagacagacacagtggggccctccacaggtccatcacggacacatggacagacacagtgggcccctccacgcgtccatcacagacagacactgtggtacctggtacctccacgcgtctatcatgaacaaaaacagtgggtcctccacgcgtccatcatgaacaaaaacagtgggtcctgcatgcgtccatcatggacaaacaaggtggggccccttcatgtgccggaacacggctcagccataatcaggagccaggctctgacccagccatagctcggatgtaccttgaggacatcacactcagtgagagacgccagaggcaggaggccatgcagcgtgtgatcccatttctatgaaatgtgcaggacaggccaagccacagagacgggaaggggatgcgtgggcgccggggcaggggagggatggggagtgacagctgacggggacagggcctcctctagggggacaatgatctggaattagaattacatggtgatggctgaacagctctggactttgtaacagccacagcatcgttcacttagaaatggggacttttctgtcacgtgaattgagtctcacgtgacagaaaaggggcggggcgtggtggctcgcacctgtaatcccgacactttgggaggccgaggcggatggatcacctgagatcacgagtttgagaccaccctggccaacgtggtgaaaccccgtctctactaaaaatacaaaaatcagctgggcgcggtggcgcacacctgtaatcccagctactcgggaggctgaggcaggagaatcacttgaaccaggcaagcagaggctgcagtgagctgagatcgtgccattgcactccagcctgggagacagagtgagactttgtctcaaaaataaataaatatggtgcgcgtctgtaatcccagctactcaggaggctgagacaggagaatcgcttgaacctgggaggcagagtttgccatgagccgagatagatcacaccattgcactccagcttagacaccaaaagcaaaactccatctcaaaacaaaacaaaaaactagagaaaaacagagacagaaaagaaagaaagaaaataaagaagaaatgcaggccgggcgcggtggctcacgcctgtaatcccaatgctttgggaggctgaggtgggtggatcacaaggtcaggagattgagaccagcctggctaacacggtgaaaccccgtgtccactaaaaaacacaaaaaattagctgggcgtggtggtgggcacctgtagtcccagctactcgggaggctgaggcgggagaatggcatgaacccaggaggcgttggttgcagtgagccgaggtcacgccactgcactccagcctgggcgacagagcgagatttcatctcaaaaaaaaaaaaaaagcagcagcaacacagagccacgtgtccacagaaccacggttcacctgcacaccgcggcagggggccccaccaggacacacggggctgagccatcacccaccagggacattgagcctgatggcttcgcgccaacctggagacggaaggctgagcagaagtgaggggggcccttcctccgggccagggtggctggagggccgggcaaggcacacacgtgacaccgcgggagccccgcagcccacggtggatgccagcagcggcatcctggcgcagcgtgagccccaggggtgggggtgggggtggccagggagcaggcagagagcggggaaggggtgggggtcccacacagacccagccgtcagcaggagaaggcacacggaaaacagacggacgcagcagggatgcccgcaggcagctcccacgggcagaggctgctgaccccgccttgggcaggaccagcctctgctcagccttgggtcttcccccaggctgagagaaacaggaaatggatggtgaaggaaccccgtccccgccaagcggccaaagttaccagcatcagcacaacacgcgcaacgccaggcactccggtccacgccgcactgtacatggtgccgtctgagggattcctccatccagtcaggagacaaccccagacaaaaccaacggagaggcactctggagaagacacaccctggagaagacacaccctggagaagacgcaccccggagaagacgcaccccggagaagaggcgccccggagaagaggcactccggagaagacgcgccccggagaacacgcgccccggagaagaggcaccctggagaactgcctcttcgggggcaagcgcagaggctgctgactcccccggtccaacaagctcttagtttttgcaatttttttgtaatttttttttttttagacagagtcttgctctgtcacccaggctcgaatgcagtggcgcaatctcggctccctgcaacctctgcttcccgagttcaagtgattctcctgcctcagcctcctgagtagctgggattacaggtgcccgccaccatgctcagctaatttttgtatttgtagtagagacggggtttcgccacgttggccaggatggtctcaaactcctaagctcaggtgatctgcccgccttggccccccaaagtgctggggttacaagcttgagcactgcgcctgacctgtaaatctaatttttaattttgtatagagatgaggtctcattatgttgcccaggctggatccacgtgtccttcatggacaaacacagtgggcccctccacgcgtccatcacggacaaacacagtggggccctccacgcatccatcacggacacacggacaaacacaatgggcctcccactgggaactcccagactcaagcgatcctcatgcctcagtcaaatagatgggacccaaatactgggactacaggcttgcaccaccatgcccgactaattttttctattttttatacagatagggtctcactatgttgcgcaggctggtctcaaacccctgggctcaaacaatcctcccgccttggcctcccaaagtgctgggatcacaggcgtgagccaccgtgcccagtcctgactcaaacatgacctcctgcattcccaggggcagaatctcccaggcacagtggccctactcggagtctgtgaagtgaagaccaccaggtgagccatgatcaaccctcccctcaatgacctccctcacgatcaaccctcccctcaatggcctccctcctcatgatcaaccctcactcagtgacctccctcatgatcaaccctccctcaatgacctccctccccacgatcaatcctcactcaatgacctccctccccatgatcaaccctcactcaatgacctccctcatgatcaaccctccctcaatgacctccctcacgatcaaccctcccctcaatgacctccctccccacaatcaatctgcccctcagtggcctccctccccaggccgtgaaggctctccagcagaaccaacagtgctgcggagtccactggccccaggcactgcccgggtccacggctcatctgctttctcctattgctctggctgccaagaaactcagggctcaggtgtatcaatagttaccaggcggatcgcctgaggtcaggagttcgagaccagcctggccaatatggtgaaaccccgtctctactaaaaatacaaaaattagccaggcgtggtggcgcacacctataatcccagctactcgggaggctgaggcagaagaatggctcacacttgggaggcagaggttgcagtgagccgagattgcaccactgcactccagcctgggtgacagagcgagactccgtctcaaaaaacaataggccaggtgcggtggctcatgcctgtaatcccagcactttgggagacgggcagatcacctgaggtcaggagttcgagaccatcctggccaacatggcgaaatcccatctctactaaaaatataaaaattagccgggcgtggtggtgggtgcctgtagtcccagctacttggtaggctgaggcaggagaatcgcttgaacccgccaggcagaggttgcagttacccaagatggcgccactacactccagcctgggcaagagtaagagtcggtctccagaaaaaaaagtcatgactagctgtctcgttatggcctgtggggttttacattcaccctcactcccagcccaggaacaggttctccctaccaatccctccaggtttatacaacagcaggaaacatttgcagggaatgcacacatgccacaggtcacacgatggctttgaacggtgcctccgtttcccctcgctcccgtgaaaagctactgtcaacctcatggctccaacaagctgaatatggtggctcacgcctgtaatccccatgctttggtaggctcaggcaggagaatcgcttgagcccagaagtttgagaccagcctaggcaacacagtgagacctcatttctacaaaacataaaaaattatctgggtgtggtggtgtgtccttatggtcccagctactggggaagctgaggtgggagcttgagcccaggaggtggaggctgcagtgagccgagattgcaccgctgcactccaggctgaacaacagagccagaccctgtctctaaaaataaaaattaaaaaaatatataaatgaaacacacacttatcctctcacagtctggagggcagaacttgtaacatcaagggtgggcagggcaggtccctcccgggggctccaggggaaaacccagttcctgcctttccagtgtccagaggcacccgcatcccttggcttggggccccttcttcccccttcacggccagagcgcaggctcttcccgtctctctctggctctcaccctcccgcctcctctcatgagggccctgtgaggacactgggtctccaggtcacccaggaagctctcccgtctcgggtccatcactcagtcccatctgcaggtccctgtgaggacactgggcctccaggtcacccaggaagctcttccgtcttgggtccatcactcagtcccatctgcaggtcccgtctgccatgagaggcgacacggcggcaggtcctggggatcaggacggggacgtcttggaggctgtaaccgtgtggccagcacatttcctcaggtctgagtcgggagcagaggcttccgtggctggctgggctgcgctggggggcacggcgcaaagggcctcgaacaccaggctcaggtctgggctccttcctggctccgcagaaccacgcggcccagcccacaggcctgggctgactcatacccgtcccgtcccacacttggcaccgcgggaccacgcatcccgtcccacactcgacaccacagaaccttgcggcccagcccacaggactgagctgacccacacccgtcccatcccacactcagcactgggggaccacgcggcccggcccacacttggcaccggggtcagacttcctccaaatgaagttctgctgctttaacagggagatttgggtccaagctgccccacatacggacgctggagcatgaggcggctgtaggcagggtgggcagggagccgggcgggcggtgctcacagaaccagcacagtggccccgagggctccgggctgaacagatgcagcagcaattgttcaggaggggaggagcaggagaattcatgagacagagatggagacggagacagagacagagacatggagagagacagagacagggagacagagacgcagagacatagagacatagagacagaggcagagagggaaacagacgaagacagagagggcgacagagacagaggcagagagggaaacagacgaagacagagagggcgacagagacagagagggaaacagacacagaggcagagagggagacaaagagacaggtggagagggagacagagagacagaggcagagacaaagagacagagacagagagggagacagagagacagagacagagagggagacagagagacaggggcagagacaagcagagagggagacacagacagagacagagagggagacagagagacagaggcggagatggagacagagacagagagacagagacagagagggagacagagacaaagagggagacagagacagagactgagagggagacagagagatggagcatagagggagacagagacagaggcagagagagagacagaggcagagaggaagacagaggcagagagggaggcagagacagagagggagataggcagagagagattgagagggagggagacagagagagagactaggagcagggggaagagggagagagagagacagagaaaagaaagagacaggccgggcacggtggctcacgcctgtaatcccagcactttgggaggctgaggcgggcggatcaccacaggtcaggagtttgagaccagcctgaccaacatggagaaaccctgtctctaccaaaaaaaaaaaaaaaaaaattagccaggcatggtggtgcatgcctgtggtctcagctgctcgggaggctgaggcaggaaaatcgcttgaacctgggaagcggaggttgcagtgagccaagatcgtgccattgcactccagcctgagcaacaagagcaaaactctgtctcaaaaaaaaaaaaaaagaaagaaagaaaggaaagagagaaggaacacacagaaagaggcagagaaggggtgaaagagaagaagggggcggggcaaggacaggctgacccagggctggggctggtaggaaggcagtggcggtgaggaaggagccactgccatcagtcgcaccccgggctcctcccctgtgcgtcccctgaagggtggggcacagatgccagctctggacaggcgcctcccctgcctcagtttccttctgtgtccggctggcatggcgcagcagcttgccacaccttggccaggaccagatcacatgggggtccagggctactgcgggtgaggacagagcccctgtgcgcacctcgctgacctcagccccaagatgagcaggggcgcccccctcccctgaacacagctggtaggccaatttccaggccacacactgggggctacaggacaggaatccaccctcttcccgtcccagggcccgggagtctgaggccaaggtgtctcagggccttgctccctcccacagctctgacccacctcttccagccctggggctccaggagaaactgacctgtggccacaccgccccagccccggcctccagcgtggcgccagctcccaatctctcctgtctcttctgaggacccttgtgctggatttcagagctacctcatctcatcttgatccctacccaatgacatccaaaaagaccctactttccaggaaggtcccctcacagactctactggggaggcggacttgacggacgcggtcaccccagcacagactcagggtccggctggctttgccccgctctgctacggccctgagtggggaaaactgggcccggggtccacccggcgagctgtttgcagggcctgggtctgggtgagccctgggacctgaattggctccattctgctgcagccacacctgaccgcttctctctggatctggccggcttgcgcccatccccccaacagctctgaggcccaggcagatctcacatgcccattacacaggggaagcggaggcttgggggagctgagcaccaggtgaccctcgctccccggcaggccctggatgtggtccggcccagcagcagcccctggccccgggtcccacacggaggctgtggtatccgaaccgtcccagggaagccgatctctgtggcactgggtgctccagagctgccgagaggaagctggggcactgggaaccccttggggaaggctgtgagggtgggggtggggtccgcctgatgccgcagtgggaggctgtgagggtgggggtggggtccgcctgatgccgaagggggaggctgggagggtgggggtggggtccgcctgatgccgcagtgggaggctgggagcctccccgcgaccctggggagaaggaggtggaaagttctgttcctttggtatgtgagttccgttttcaggtggctgctaaggggttgggactccaatgtgcagggtgtctggacccgcctagagggagggccgtgggggcaaaggctgccaagggcatctctcccagcaccgccctccccgcaactccctctgtggcattgcccagatgctcgcagggaccccaagggctgggcggggctcactgctgacacgaagggccagtcactggctcttccccaaaaccaagccacatctctgggctcctactgccccaccgtaaaccctgcggccgaggggccaagccgaggtcactgagtcccaggcaggcctgagcgagagaggtcgcagggcagctggaggggcggcccagactccaccctgccccccacggcgcggtgagctcctggggctcctacctgagcaaagtcgcaggtctttggtggcaagctggaggcggtggccacgggggcatagctggtgtctgggcagggctggctgccgaggaaggaggcggagctcatgaacgggctggagggagatgggggggggggaggtgagatggggtgctcaacccactccctcagtaacacacctgcacccccatggccgcagccagaggcccctcgaggccccactggagtgtgcccagcccggcaggacccatggccccgctgcacatacagaggggcctccaggggggtggtggtcaagcctggggctgccctcccacccccactggacacagcccggcagagctcctacggaacagccgcctggtgggcggggggacatccagggccaccatcccgccctccccgctccatcagcaggactcggctaagggttcattctggcgattcagaaccccagcctggccatccctcccccacacacaggccccttgacccacacctcactcccgcctcgaaggaggagagcgctacgggcagaaacccaggatcaccgtcctccagggagggctcaggtcggaaccccccgccctgtcaccctgaggatggcaaaggacacagcaaggagaaggtcctgggggccccccgcccaggggcgcctctctccagatgatcccaggagtaaaatgtggctggcagggaggcttctctgcccttccccactccggcccccttggccagctcctgcgcttgggagaggggtggccgccgtccccagggcctccttccctcccgccaggctccccaggctctccctccagaagcttctctccagcagggctggcagcaggtccaggtctctgcccagtgggagccggaggccttgggttggaggcggccctgggcagacctgctcccagggcagggaccgcctgggggccactctcctcctgcatagaaaggtttgcaaacaccagcaggaaagaagcatccactccactcccgggccacaaacagctgctccacaatctcctggagtctcccaaggctctggctatacctgctcccaagccctttgcacagcctgctcgactgctcgcctggccaactcctaccccccctgcagaacccagcccagctgctgccctctgtgggaaaagtgcccttcccaccctccttcacccaccccagaaaacctcccgccccttcccaccctccttcaccccagaaaacctcccgccccttcccaccctccttcaccccagaaaacctcccgccccttcccaccctccttcaccccagaaaacctcccgccccttcccaccctccttcaccccagaaaacctcccgccccttcccaccctccttcaccccagaaaacctcccgccccttcccatcctccttcaccccagaaaacctcccgccccttcccaccctccttcaccccagaaaacctcccgccccttcccaccctccttcaccccagaaaacctcccgccccttcccaccctccttcaccccagaaaacctcccgccccttcccaccctccttcaccccagaaaacctcccgccccttcccaccctccttcaccccagaaaacctcccgccccttcccaccctccttcaccccagaaaacctcccgccccttcccaccctccttcaccccagaaaacctcccgccccttcccaccctccttcaccccagaaaacctcccgccccttcccaccctccttcaccccagaaaacctcccgccccttcccatcctggtgtcacctccacaggaggcccccctggcccatagcccacacctccccgccctctaccaagctgggctctcgaggagagggaagccatggatcacaaaacagcgttccacaaacaggggtctcagcctggacctggcccgtggggtggagccttccaggaccacgtgcacaccaccctccaaacccctcaacaagactttgggccctcgcgccctgcacccagaactccgtttgtaactgtgacttcagaatgagcaagcctgggggccaggcggggagggtcccggtactcaccggctgtcgctggagaaggcagggtatggcggcagcgagaaggtgttccagtaggggcagtgcagcatggcgctctagaagagacagcgggcatcagtgagtgggaagcagaggacctgcggtgcagcccggctaagccctccgggcagggtgacaggccgagaggctagggaggccccgcagtcagggtcccatcccgcccctgctggtatctcctggggagtcatttaactgccccgtgcctcagtttccccacctgcacaagaccccacccaaggcttgtggtgtggtctgaaggcactgaaccacccgcgtgaagggctcagcacaggtcttgctctaccagcagccccatgtgcaggcccgcagcccgggagtctgcatctcacacaagacctgggggtgccgctggccccgggaccctgcttggaggccccattctaggaggtggaggatcggaccgtttgcgtgagggagacgcgcacccgctgcctgtggtggagggtgggtgtcgggggctcctcgggcagggcctggggcaggcgagggcctcacaccacctccaggcccctcggacaagctgatgtgcccgggaagctcaggctgctgcgggacggggccctgacttctcagaagctgcacggggctggggtgcggggagcctgctttgggaaatggtgaccagtggcctggaggctcagcccgaggtcagtggaggcgtgagtggctccaggttggccgaatctctggtgggtctgactccaggccaggcttacccaacaccctcgccaggagccgatgtccccaccccatggttctctgggaaaacctcactatgcctgcccttgggaatgagagcggcttgaggcacacggcaggccccaaaacctgaggatggggagcacacggggcagcagcgggcccaagggcggcagcgggcccagggtcagcacctgcggcttcgggggcagggctgtggacacctcgtgccctgcagaatgggcacccctcagcagggcccccacctgcacagggccaacctcacctgcagcagagagaccctgccgtcacagacgcccccacagtcacgggggagaccctgccgtcacggatgcccccacggtcacgggggagaccctgccgtcacggacgcccccacggtcacgggggagaccctgccgtcacggacgcccccgtggtcatgggggagacaccaccagccgggggcatcatcctgcttatcccagcaggactgggggccacgctggcttccagaacagggttgggggttcgcctgcttccctgagtcccccagtgacctctcccaggcccacgtgagccctgctcctctatgaggccctgatgcaattccctggggctcggccacctctgcccctcattcacctcacactggctgggaaccagcccggatggccgggggccactttctgtacccgcaggtgctgggtgggggattccaggacccccgacagcctcgagataggcaaagccctcggggtgaccgctgccccgctcctccagcttttgcataaaataagtttatcagcaaaagcccacagctcctcccctgcacagaggccggcagcctgggcaccctgagctcctgcacccgtgagaagaccccgtgcaagtggcttgcaggaagccgggccaccagccacaggggctccagagcccgggtctcctgatccttcccctcctcctgcccttttgggaagagagaaagccagccctggagagaaacaggaacttcccaaggccatgtggcacatccggaacattctggaacagaactctgactccagaccaacccagcctcctcagatgagctggagtccgtctcaggcacacacggcgccttgggccaggctgggcagggccacggccagggaactgcagctgcaggaagggggcggggggcttggggtcgcagggcgggaggatccaggggtccctggctcacccaacatgctccacctgtacccaggccaggctaggggatgggacggggggaaagtcctgactgcctctatccccctagtctcctccctcccacagcccatggctcctctgagacctgccatccacacacacccgagtcccaccccacaggggtgccatgggcatggcaggccaatcagagtcttccctgggaccttctctggcagccagagggtgtggcttcacctttagatggcaggtcctagcacataattggtccagagatgggcacctgaccctgcccagacaatcagagcctgcctggtgattttctttcctttccttattttgagacggagtctcactctgtcacccaggctgaagtgcagtggcacgatcgtggctcactgcaacctccacctcccgagttcaagcgattctcctgtctcagcctcatgcgtagctgggattacaggcgcccgccaccacgcccagctaacttttgtatttttagtagagatgggatttcatcatgttggccaggccggtctcgaactcctgaccccaagcaatgtgcccacctcggcctcccagagtgctgggatttcaggcgtgaaccattgtgctggccggtgtatttttatttctaattgaatactctgggcactggaagaggctgggctgtgcgtgtgcgaactcagtcgaccctgcccagaggtgtccatgacgtacccgaatgtgacggaacccggaacagggagggtgggatgagcctcacacacgggatggggagcaaagccggttacgcgcacgggtgcgccccggcctgagccctgtggctggtgtccagtgcccccgccgggttccagccctgtcgcattccccgactgtcactgctaacaccttcctgctcccgctcggatccttgaagatggctcctctgtctccacatcccataattcgcttaattatttccccaccgtagagcctctggggagattccagtttcctgccactataaatagtgccgctctgtcttcccctccctcctggattagtccccagggtgtgtttccgagatagaattc

SEQ ID NO: 4 - DNA, 164810 bp, Homo sapiens
gaattccaaaccacagaaacctcactctcatgggccccactgcctgaggcattttctgttttgcttttgttggtgggttggttggttggttggttggtttgagacagggtctggctctgttgcccaggctggagtacagtggtgcaaacgtggctcactgcagccttgacctccctggctcaagcgatcctcccacttcagcctcccaagaagctgggaccacaggtgtgcaccaccatgcccggctaatttttgtgcttcttgtagaaatggtgcttgctgtgtttccgaggctaagtgatcctcatcggcctccaaagtgctgagattataggcgagagccactgcagctggcctgcctgagttcttgtgcctctctgcctccctccctgtgccagcctcacgccccctcctcaccttccccaattcctactctcaccccgccctgggtccttcccctctcactggcctgagctgtttctggaactgctgcctgccctctgctcatgtcctgcctctgccccgtgaaaccagctcctccatgttccctgtctcaggggtgtcctccagggcccggagttcctgaaccagattcttctccccacctacctcacctttctgtccagtccgcctatcagtcagccccctttgcagcagaatgccaccccaaaacccagcgcctggaacattctccacacagtttctgtggggccgggatctaagggcagcccggccaggggcttctagggtggctcgtggggctgcagtccacatgctggttggggccacatcatcagaaggctccaacggggctgggggtctgaggagcctcgctgggggcagcagcccaggagccacagcagccgcccatgaatatcaccgccattctgttggtcacacagagcagccccggttgaacgtgaagaccctataggggctgggcttggtggctcacacctgtaatcccagaactctgggaggccaaggtgggcagatcacctgaggtcagaagtttgagcccagcctggccaacatggtgaaaccccatctctactaaaaatacaaaaattagccgggtgtggtggtggatgcgtgtaatctcagctactcaggaggctgaagcaggacaattgcttaaacccaggaggcagaggttgcagtgagctgagattgtgccattgcactccagcctgggggacagagcgagactccgtctcaaaaaaagaaaaaagaccccataggaaggcaagagcctgaacagcaaacgcaagcccaggagccctgtcatcccagcggccagaggaccatcccccttggctcccactgaactcagctgcagtccccaccccatcccccaccaccactagggctaagagccagcagaaatccttgggctggcttcattgttcctcccgggaagagtccagggcagctgacacatgatcccagcatggcacgccggggacaggggaggcactctgctgtccctgactgtatttaaaaaaaaaaaatccacaagcaaaatccctaatgagcaatgttccacagtaagtcctgcctcagaactgtgcaggcatcagaaacaggaatgcctgagaaacggccacggtcccaggagctgaggaaacaccacgcctgatgccacgtagggtcctggatggagccctaggccaggaaagggcattagaggaaacccaggaaacttggatagagtgtagattttggtcagtaataatgtatcatgtgacaaatgtatcacactcatgaactgggcatggggtactcacaactctaaattattctaaaaatattgatataaatttaagaccaaaaccatggccaggcgtggtgcctcactcctgaatcccagcactctgggaggccgaggtgggcagatcacctgaggtcaggagttcgagaccagcctggccaacaaaccctgtctctattcaaaatacaaaaactagccgggcatcgtagtgtgtgcatgtaatcccagctactcaggaggctgaggcaggagaatcacttgatccagggaggtggaggctgcagtgagctgagatcttgccactgtactccagcctgggtgacagagcaagactccatctcaaaaaataaataaataaaaataaaaccaaaaccctacagcacgggcagctatgagaactagagaaggaagagggttttgtgcacctgccagcctcttaggttcttgtcagcttttcccccaagtctttattattattatgtattgtagagatggggtcttgctatgttgcccagactggtctcaagctcctggcttcaagtgatcctcctgcctcggcttcctaaagtgctgggattgcaggtgtgagccaccatgctgggcccctccaatccttttgagctgcccaagaacagagaccaggcctggctttgctcagcagtgggtccccagcccatggcacgaattcagtaaacacttgttgtggtcctcaaggggcccccagtcttgctagtcacctgtgttcacctaatttgagcctctgttttctttactttttctttttcttttttcttttttttttttttttgagatggagtctcactctgtcgcccaggctggagtgcggtggcacgatctcagctcattgcaacctccgcttcccggattcaagtgattctcttgcctcagcctcccgagtagctgggatttagatacagggtttcaccatattggccaggttggttttgaactcctgacctcaggtgatttgcctgcctcagcctcccaaagtgctgggattacaggcgtgaaccaccgcaccggcctttgcctctgtttttgtaatcataaaacaggcagacaaaacctccagtggaattgtgaaaattaaatgatatgcatgcagaaagcgttctgcaaactctgttttgctagtttgggtgtttagtgttagtttttatatcattagtactggttgtaaacttatcaatttaagcaagatggaaaatcgagggtgtgtcagggaagggggaagtttgagctgaaattatgacctcttaggggtgggaagaggaggctttggggttgtgaggtctgagcccccttactttgggatgagtccacatcgcggcgactcctctgcagaatgcggtgatgttgcggtaaggggtccgggatagctgcgaggcagctggaccaatcctgaacgaaagacatcagtgatcgcaagaggcgctaaaacttctgccgaaacccgggatcgaaccagggacctttagatcttcagtctaacgctctcccaactgagctatttcggctgggcggcagagtcgctctcgccgggactccgtcccgcgctgcgccttccctgcgcaggcgcagtcgtttcgcgtcagcaggccccacatcctttgtaaggtctcccagggcgccggagcgcagtgtcgtctctgtggcgcaatcggttagcgcgttcggctgttaaccgaaaggttggtggttcgagcccacccagggacgcgtggtgacttttgccctcctggaataacaagaaaatgagtgtcgcctctgtttttgtcggtccgccgcagacccgcggcccccacgtgcgcactccgatgacctttccgcctcgggtgatctgggggtgcacggcgcaacacgaccacggaggccgaaagcgcagcggaacctcccggctccaggttccggtttccgcatgcgctccgagccgctttgggcggcggccccgggaacccggagcgctaaggagaacggacctcagaggttgtctgaaggccgaggccaagatggcggtgctgtcaggtgagcgcggcaccggcggcgggtgtggggccgcgcgggtctggggccgtgggagcctcgggtgtcgtggtggcgtcgggggtcggtgccggcgtcgtggccgcggtcctctccgggcttctccgagccggccgctcctcgggctccccgcccggcttgcgatgaacggtcgccgttattgcgtccagagtacagtcggggaaaccgaggcccggtaggtcatgacgcaagcctccagcctcaggaaggcgctcggggtggaggctggaggggccccattcacgtccccgagaccagggcacggcccgcgaggctgctcttgagatgccctggagagagcggggcctgcctgacaggctgggaaactgaggcccattgagggtcttcgaggtcacagggccgggcctgggaaggaacaggacccaggacatccacgccaccctgctggaccctccacctccctccccacccctgggaggtaagggcctctcgcagagcctgtcctgctccagggacttttttgggatcagctgaagcctgcggacctctgctcagataaagttattaaatgcatggaataaaatccatagaattgcaaggaaatcagttacacggagaggcagttattaaaagattgtcttgaaacctgattggcgacttagtaatctaagtgcttcccttatgaacgcgatctagcggcaggtctaattgcgactgtgatttggaaggagtgaggagtggaaatgaggctttgatgatacggaaacgtctgcagcccctgcaccatagctaggaaacatctgtgattccgcttggtgaaaagttacaggtcctgctaatactgccgtattttgttgtctatgctaagaattttttatttatttattaagacagggtctgcctctgtcgctcagactggagtgcagtggtgccatcttggctcatcactgcaacctgtgcctcccaggctcaagcgattctggcacttcagtgtcctgtgtagctgggaccacaggtgtgcgccaccatgcctggctagtttttgtatttttagtagagatgggggtcttgccctgttgcccaggctggtctcgaacttctgagttcaagcaatcctcccacctgagcctcccaaagtgctgggagccacggcacccagcctacgctaagaattgaatgaagggctaattttccataagatgctggtgacaacaaagacatatatatttttttattccaagcaaattcacagttctgaatcctcaccaggccccttgttaagaatgcctggcccacgcgcggtggctcacgcctgtaatcccagcactttggaaggccaaggtgggcggatcacctgaggtccggagttcgagaccagcctggccaacatggagaaaccccgtctctactaaaaatacaaaatcagctgggtgtggtggcgcatgcctgtaatcgcagctactggggggctggggcaagagaatcgcttgaacccgggaggcggaggttgcagtgagctaagattgcaccattgcactccatcctgggcaacaagagtgaaactccgtctcaaaaacaaaaacaaaaacaaaccagctgggcgtggtggctcaggcctgtaatcccagcactttgggaggccgaggtgggcggatcccctgagttcgggagttcaagaccagcctgatcaacatggagaaaccctgtctctactaaaaaatgcaaaattagctgagcgtggtagcaggcgcctgtaatcccagctactcgggaggctgaggcaggagaatagcttgaacctgggaggtggaggttgcagtgagccaagattgtgccgttgcactccagcctgggtgacaagagcgaaactccgtctcaaaacaacaacaacaacaacaaaaaccctgacccagaggcacagaatcccatcacctcagaggttctcagaagagtatctcctctgctaggagctcatccaaagtcctgcattttcagcttgggaaactgacacctggagtggggcagctcccaccagagcctggggctgggcagttagcctgtctgctgtgcccagcctcaggcatgccaagaagtaggtcacaggcttgtgtccttcagagagttgtggcctggacggggccatgggaaacagcaaccccggatgaggctaaggctggggtgagggaggggctcagaggcaggagaaggccccatggatcgctgcattcaggggcatcaaaccctggccctggcccctggaggctgcccacagcctctccatcgggcctcacctcacccacagcgacaaagtaccatcacctgggcagcttcaacagaagctgattgttctcacagttctgggggctggaaggccaagattgggggtcagcagggttggttcctgctgaggcctctgtccttggcttgcccgtggccatcttctccctgcgtctttcctctgtacatgtttgtgtcctgatcgccttttcttacaaggacataagtcatatcggatgagggcccaccctcgtgacctcactgtcctttataatgaccctttattttattttttgagatggagtctccctctgtcacccaagctggagtgcagtggcgcagcctctgctcactgcaacctctacctcccgggttcaagtgattctcctgcctcagcctctcgagtagctgggattacaggtacctgctactacacccagctaatttttgtatttttagtagagacggggtttcaccatgttgcccaggctggtctcgaactcctgacctcaggtgatccacctgcctcggcctcctgaagtgctggaattacaggcatgagccaccacgcccaggcattaatgatccctttaaagaccccatctccaaaagcagtcacattctgaggtcctggggttagggcttcagatgcaggtcgggtggagggtcacagttcagccgtcaccagcaccaagcctgcctttctggattcttccttgtgagccaggattcctggcacctccaggtttcctcccgctgagtgccccgggcgtggcaaggccctgctctggccttagtcttcgcctcgggaaggctctcccaggagacttcgtgcaggcgcgttccctcctctgcgcttcctttgaggctggctcctctaggggtgcttttctgtgtagattgacgtgggcagcgccctccccgcttagcggactgcagattcctgcaggatggggcctgtgctcagctgcgtgggaaacgcccgagcagcagccagggcctggagcacccagcacacgcttgtcaggcacagctgaggccaggacgagcactgggtgcccagggaggccccagcattgctggagtggcaggcaccccacaagcacgcatagatggagatagaaccgggtgccggcaaccggaggacctggggtcctggtgtaggcgggacgccccgggtatctgaactgaaacctgcctcatgagaaggggccagcagtgtgcaagtgtgaggcggggtgtcccccgcagggcagcagccagtgtgcaagtgtgaggcggggtgtcccccacagggcagcagccagtgcgggggccctggcgcaggaaagcggcaggtgccagtgaagatcgccagggcggggagacggggcagcgtttgggttccttccggggccatgcagtctcaagcaggggactaagactctctcgtgttctgaaaaccccctcgttacctaacgtttgttaagtggcactcgagttgggatcagagctaggctgtgcgggcaggagcctgatggggaagcgcctggaggccggccctgcgtgctgcccgcagctcactgttcccaccccgtggtcctctctgcagctcctggcctgcgcggcttccggatccttggtctgcggtgagtgcctgagtctccagccctcagctgggaggggccttcagcagcgacagacgaacggggcggggggggtggggggtggggggagcgccttgttgaaggtcacgtgtcatgttagggacaggatgcaggtgacggtctgcacgctgcccgtgatgtgccgggaccctccctgggacagtccacgcagtggcaaaggctggacagtcaggaggaaaaccctgtgggcccggctcagtgccgtcagagctcaccgccacctggggtgggaaggcattctctgagccctgtgcagatggcagctggggcaggcctcctgcagacccaggtgactgacagggcggtgagggcgcatgcccagggatcttaccttggtcatgtgtggagggcctgctgccagtttccttctgtggatgatcctgggaccgtccttgcttggacactgttgacctgctgggtacgtcacaaaagaagttccattcaagtctgggccatcattgggggtcggggcgatggccgcatggctccagcggctctggccagtggcccaagtgttgacaggcagaggtgagaacagtctcgcagcagggaggggagaggcaggacaacagtgagtgcggctgggggagctggaggggcctgggacagccactgacccgcgttccatctcccggcagctccagcgtgggcccggctgtgcaggcacgaggtgtccatcagagcgtggccaccgatggcccaagcaggtgaagctggccttctgggggaggtcgtaccccctcgccccacccccatcccttccttattttctgcatcagtgccgcagccactgaggtgcatggatggggcagggagggggtcacacatcccagtccctgacctcatgtgggtccaggcctctggcagcggccgtgggggctcgcatccgcctctgggaagcacctgcgtggctgacgcctcctgtgcccgtgtgtctctgtgccagcacccagcctgccctgccaaaggccagagccgtggctcccaaacccagcagccggggcgagtatgtggtggccaagctggatgacctcgtcaactgggcccgccgggtgagtactatgagctgtaggccctcctcgagcgccagggcctctctgcacactcacaggcacacacatacacacaccaacgtgcagacacgtacacacacaacacatgcatgcacactcacatgcgcacatgtgcatgcaagctcacatgtatggacagatgtgtacacggaccacacgcacactcacgcacacaatgcacatatgcacactcgcacacatgcacacttgcacacacatgcacacacaagcacatgtgcacacacgcttgcacacatacacacatgcacacttgcactcatgcacactcatgcgcacatatacacatgcacacgcacactcgcacacacgtgcacatatatgcacagtcatgcacacacatgcacactcacacacatgcacacacgtccttgtgtggacacatgcatgtgtgcctgttggcatgcatgcacacaggcacactcactgatgcacacacacccctgcggccgtggagcagggcggaccctcccggaggcccctgtgctggcctggtggcctgtggttccatctgaggattcggaccctgctggagatgacccctccgtttccgtcattctctttctggcgtccgtgtgttcctcttgtttctcttttaaggtgaaagcagtgttttaagttaaaaggagcgcgtgtgaaggcagtagatccttctcggtacccgtttaaagcctcccctgcctgtggcgccagcccccacgcagcccctgccatccccctgcagcgtgagcacgtgcagctccctccagctcctgcggcacttgctgcgacagcccgggttcaacaatcccccattgatggacgttcactgtttccttttgttttttgtttcctaaacaatgccacggcgaacgtcctgccagggccgcagtggtcgagacaaggatagtttttaatgcaggatagttcttttctttttcttttcttttcttttttttttttttgagacggaggctcgctctgtcgcccaggctggagtgcagtggtgcgatctcggctcactgcatgctccgcttgccgggttctcctgcctcagcctcctaagtagctgggactacaggtgcccgccaccacgcccggctaattttttgtatttttatttttagtagagatggggtttcaccgtgttggccaggatggtctcgatctcctgacctcgtgatccgcccacctcggcctcccaaagtgctgggattacaggcgtgagccaccacgcccggctaatgcaggatagtttctaatggagggaacctgagacatggccagcggccgtcccaacacaggcttctggcgggcaggtggacctggccatttctgcccgggcagccctgcctcactctgtagcctgaccctgtcacccgccaacacatgcagcagggcccctgccaggtctcagagccgcgtgcagggagagcgggaacggtgggggaaatgagaagccacagggatggaggagaggggagggagtggccaaggagatctgagagggcttcctggaggcgtcgcacttggtatgtggacccagatctagttaacgcagagagttcccggttagacctgcgctactactcgcctgtagcccacgcgctcagagagtggctggagccccctgttgaaatggtgggacttaggatacactgggttcgaggaactatgtgatgaggacagatctcacccgtttctctctattttatgtatttgaatgtggctggtggggcgcgctttacaactcttggggcccggaggccacctgcaggagccgctgtgcctctcacctctgccggctgccgccccgggacatgagtcgggggttctgggtgctccacgtggagtctcacgctgggccacgcggggctccgggggtggcgtctgacccgagcccggcctccgcagagttctctgtggcccatgaccttcggcctggcctgctgcgccgtggagatgatgcacatggcagcaccccgctacgacatggaccgctttggcgtggtcttccgcgccagcccgcgccagtccgacgtcatgatcgtggccggcacactcaccaacaagatggccccagcgcttcgcaaggtaggcctcgtcccagccgcccagccgcccccagagtgagctgcgcacggaccccgcctctcttccaggtctacgaccagatgccggagccgcgctacgtggtctccatggggaggtgagtgcagggcggggggtctccagggacagacgtagcgtgagtgctggcctggccgtgccctgatggcgcttatcaaaagtgtcatctacattcagtgaaatcccacgtggtcccggcgctgcccttcagccgtctcggtgcctccaccctaggcagatgcgctggtgggcctctccccagaacgattcctcccatccacccccacgcagcagaccccacattccgcccagttctctgctttactcacacataagtgatgacaggtgctgtagatagttttataatctcagccttctcacttgccattagttttttttctttttttttttttttttgagacagagtcttgctctgtcaacccaggctggagtgcggtggaaccatctcggctcactgcaacctccgcctcccaggttcaagcaattttcctgcctcagcctcccaagtagctgggattacaggcatgcaccaccacacccagctaatttttgtatttttagtagagacggggttttaccatgttggccaggctggtcttgaactccctcaggtgatccgcctgcctcggcctcccaaagtgctgggattataggcataagccaccacgcctggccttgccctcattttttagtcatttccccgtaacattgaaaggtatttagtctcttaacattttaaaatatttatttatttacttaaagatggagtctagctctgtcgcccaggctggagtgcagtggcacgatctcagcccactacaacctccgcctcccaggttcaagcgattctcctgcctcagcctcccgagtagctgggattacaggcacctgccaccacacctggccaatttttgtatttttagtaaagaagaggtttcaccatgttggctaggatggtctcgatctcctgatctcgtgatccacccacctcagcctcccaaagttctgggattacaggcatgagccaccatgcctggccaatatttattatttttattttttagagacagagtctcactgagttgcccaggctggagtgcagtggtgcagtcatagctcactgcagccttgacctcctgggctcaagcggtcccccaaccttagcctctcagagtgctgggattacagatgtactccactgtgcctactttttaaaatttctgtagagatcaggtcttgataagtttacccttttaaagcgagcagttcagtggtttttaggccaccacctctaattccagaacattctcatcacccccaaatgaaatgctgtccccatcagcagtcactctgcatccccttccgagccccggtgcccacacctcccctccctgtctctgtggatgggcccgtcctggacatttcacagaaacaggatcacacgccgcatggccttctgtgtccggcgtctctcactgagcgcgacgtcctcaaggtgcatccgtgctgtggcctgtgtccgagcctcgtgccttttcttggctgaataatatcccactgtgtggacatattactaatctaattctaaacagttaattagaatattccagagttttcataaccgtctcccactgctgggcattcagggtatgtccatttttacggctgtgggaagcagtgctgggagtggagtctgtgtggtctcctggggtttccagctccctgccccgggtggaccccagcgcctcactgacagagccggaatcaggcgagggtgaggctcagccgccccatagacaggggctgggtgttggcactgtggctgtctgaagtggctttttgttgacacatgtgatctgacacatcccagccccgggaatcggtggtcaggagccccctcgggaggggagcacttttccccgagttatcagccacgtgtgagcttgcgccccactggtcccacagaggctctgggagcctgtgcgtgtttgctcattgcttctccgtgacaagttccagcctcgtaggtgcctggcctgcagttgaaggcgggtggggatggggcgaggcctcgtggagggagggtgggcaggcgggtcttcggcacactcccctcacggtgcctccccaacagctgcgccaacggaggaggctactaccactattcctactcggtggtgaggggctgcgaccgcatcgtgcccgtggacatctacatcccaggtagggccgggaccgcaccgcccacgagggagctggagacagggccagcgccacacggagcccggcggcccctgtgagggagtcccacacccccagcagacggcgggctcccccatcctatggatgggccgactcggagcgctgcctcttagtggagcctgtcccctgtgagaagtcggcgatgtattcaggcatcagagggatcagagggagcaggggaagctgagtggaattcctgacacacgcctggtttacagcagtttcatatggtcctacctggcacaaaccaaagacctgcagttagaaataccaagcgagaaggttcctgggggccaaggacactgtcccgcgccctcagccttacagaagggcacgcaggactccctgggacccggggtggccggatttggcaaatgaaaacgtgggaggcttagtttgactgtgaggttagggtgaatttgaccatcaggaaaactgttagtagtaattgtttagtacgagtatatcccaacaatatttgggctatactgacactaaaaagagcattggctgcatacctgaaattcacatcgcaccgggaacattctttatatctggtgatcccgtgggactcttgcacctcacgtggtcccacgagggccatccccccgggcgttcaccttgacagtggtccacggtaggcaggcttggaggtggcgctcatgtgggacaggggacagagtcctgttcttggccaccctgtgctgcgtgcggcattagctcatgcgcagagagcccagccctgagtcccgagtctgggggtttgggcaagcgagaggcacatcctggtgcctctcaaaagtggaggaacaggctctgactttggattccgcttccctggaaagggcgttgatttgttcagcgttctgcacggttcaggtcaccccgggggcagtggagagggcagcctgggcctccctgtgacttgacagcacagagaggtccatcctggggtcaggagctctgcccatgcccctggcgtcttcccctgcagtgcagaccaatggggcaagttgcgagtgtggactgtactcctccctccttgcagactgagctcctccctccctggggaccgcgctcctccctccctgcggactgtgctccctgtctggggactgcgctcctccctccttggggaccgtgctcctccctccctccctgcggaccgcgctcctccctccctggggaccgcgctcctccctccctgcggaccgcgctcggccctccctggggaccgcgcccctccctcccagcggaccgcgctcctccctccctggggacctcgctcctccctccctccctgcggactgtgctgctccctccctgcggactgtgcttctccctcccttggagcagcctggacttgccagagctctgccaggtggggcctggccgccctttcccaggccctgcagtggccttgtcctttctcacctgtttccactcctgctgtccccgttgggccctgggcttcgtcctcttgctcaagccctttgttctgaacctgcgtggcagccgggactgggggatccccagcaaagagctctggcttggggctcagaaagagggtcatcgggtcctcgtgggatgcccgggctctgggccacctcccctccctccgcccagcctccctgcctccatctccgtccagggcagccccgggccctgctccccactgctaagtgtgtctgctgagcgctggcccccattgagtcctgagggctggggccgggggccgggttagtgaggtcagcgtcttgtccgagaggtccctgtgacagcccgggatgagccacgggtggagggcagtggggccttgcccaggggaggaccccactcttcctgcagggacctcccctgcgccggctcccagtccctggcactgcgcccacccagggctgtcagcctccaccttcagaggccggcccgggaaacccttccaaagccgagccggctgcgctgtgcacgcggtcacgcgggctccggctgcgggaagcgagactgaggcaaggtccctgcaggctgcccacctacggccgaggccctgctctacggcatcctgcagctgcagaggaagatcaagcgggagcggaggctgcagatctggtaccgcaggtagcgccgccgccgccgccgccggagcctgtcgccgtcctgtccccagcctgcttgtgtcccgtgaggttgtcaataaacctgccctcgggctgccgcctcccagtgtggtgtgtgggtgaaaggagccggggacgtggggggatcacagaccccctgcggcgtgccgcccttgggctgggggcggttggagcagagccgggggcagagacgggcactgtgcctgccagcagggtcctttcccgctgctctgcgaagaccctggggtggacatcgtggcccaaagtcccgagcgtggaaggccgcacacccatccttcctgggagggccctgactcagtctccctctatgccctaaggcaggctgagcaaagcccgtctgagcctgccccggggttcagagtgtggcctgtggcctgcgtgtggacttgggcaggtcgccactgccctctggcccatttccaggcggtggcatgggctggttagctgagggctggggccagggagatggggaggtggcacctggtccaaaccaaagggctgcagggcaggactgtgagcctcacaggctgtctgaccccactttggggaccctctccacccagggctttcggggaaccctgactccaccccaccagccccttcatccgtcgaagtccaggcctcatcagggacgtgcattcattcagcaaacgtcccatcttcctgtgttcagcgccagatgccgccggtgctgggacctcgctctgcaggcccaccctgcatgcctgctgcacaccagggacagttctggggatcggcagttatgacgggccaggctgggatggggcccgggagactggggcgggggtggggaagaggcacccagcccagccgggtcaagcagcctggaagcaggacatgctggggtggggacagggcgtcagccagcggaacagcagccctgggccagagtgcagagcacaggagccggccttctctcagggcaaggaggtcagtggagggggcgagcaggacggccccaggaagatgggcgggctgcacacatgtggatgcagggggcaaagtgggaggcatggggtgaccagctgggcacaagggcacagacaggcaggacccgggatgttcctggggctgggcaggtggggctgcccctgcaatgggcccagcaggggcgatgcctcctgagaggaaaccacatctggaaatgggaggcttggggaacggggctgtcagcagccacgcccctcctggggcgggaggaggggagctcagggtgtgctggggcgggcagagaagtgggttcctgcctggggtgggcaaagatccttgtcccacccacaccccggccgtggtgctgccaccccctgagaccctgacctagttacccccttccctgaccccactgcaaagggtcaggtggctttcatctgaggaagggacatcgggcatcagctggagatgtctgctatgggcaagacagtggggggggcggggcggatcctggggccgctcagaaacctggaggggagtcacccacttttcctgtgtccatgggatgggcgggaggtgagggagcagccgctggaagtaacagtcgcacgctcactgccgactggccaagcccagcgccggcgtttacttcacctcagggaccctgcagtgggcagcagtgaccctcacagagaagctgggaaagctgctggtgacacacagctgggatcagccctgggctggtgggacccctcacagagaagccgggaaagcttctggtgacacacagctgggatcagcccagggctggtgcgacaccctggactcccggccaggaaggcacggaggagggcatgggtgtggccgggccggggtgggggctcagcctttggtcaccaggggcgtgatcatctgtgggaaggcgtagtagcggcagtcggccggtgggaccagcgccatcacctccgtacggatgttctccctccggaagccggcctccagcagcgcgggcacctgcgtctcctggtcggggatggcaccaggtcacctctgagggccatgggggtcacgtgcaccctggcgcccacccctcattgaagagtgtttacagatggcaaggcccgggtgggcggctgcagctcccgtgggcacgtggcagggcagccctggaagcccaggtgtgaacgggaatctccagctccccagtgcgggcagcagcttcccggctgtcctggaaccccagccccacactcgagccacccccgggcacctactccacagttctccagaccttgccagtgtggcgggtggagccaaagaatcacaccagaaaaagaacacaggccactagttcccattttggaagaaaagctgccccaggggccacaggcacccagccggctctcacaacagcagcccagggcaaccacatagagcccttctcagataggccgcctccaccaggcagagggaacagcgagacaagcactgctgaaccagcaaagacagccaggtggaggcagctggagggaggggaacacgcagggcttaggctgaaccacagggcactggggagccatgggaggttgttgagctggtgagggactttgatttccattttttttgtttttgttttgttgagatggagtctcggtctgttgcccaggctggagtacaacggtgcaatctcggctcacagcaacctccgcctcccatgttcaagtgattctcatgcctcagcctcccgagtagctggaattacaggcgcccgccaccacgcctggctaacttttgtatttttagtagagatgggattctgccatgttggccaggctaggctcaaactcctgggctcaagtgatccacccgccttggccttccgaagtgccgggatcacaggtgtgagccaccacgcccagcctgatttccattttttttttaaattttctttctttctttctttctttcttttttcttgagacagggtctggctctgttacccaggctggagtgcagtggttcgatctgggctcactgcaacctctgcccctggggcccaagcaatcctcctacctcagcctcccaagtagctgggagtacaggcacacgccaccacgcccagctagttttttgtattttttttttttaggaaagatgaggtcttgctctgtagcccaggctggtcttgaactcctaggctcaagcaatctgcccacctcggccttccacagtgctgggattatagacctgagccactgctcctggcagccactgcgccaggcaaaggactttgatttctaaatgaaccagcacagtccagcccacccagggggtcaggaagggaccctccccaggtagcaaggtggctccagcagccccttcccacccccatccaaggtcacttcctggagacccatggggaacttcaggtgggcgcacctcaaacatgatggtgatgtctgagtacttggacttcatcagctccccccaggaggtgaggttgcagtaggtgaggacgccccccggcttcagcaggcgaaaggcgtggttctgtggaaggggagtggccagtggtcaggacggaggtgggggtgtgggcagaggggcttccccgagggcctcccgcatcccagcaagtcagagagaaccaccttgatgaagttgaactggtgtgtgtgccaggtctcctccgagagtgggtacgtgtcgtacaggatccctgcacggagaacagaagcccacgcggtcagggccgggctcagcgcctcacccagcctcacccggctcatcccccagcgggtggaggtgcagtgagacggggccgtgggtagaggtggggctcccacacaggcttgagaaccccgagatcgcctccagggcccctccgtgagcatgcccatccccggtgctccgccatcccacagccaggcccacacccacttgggctctgtccccccagtgcacatcagagggacccccacaagcaaaggaggggctgcattggagctggggaggcccaccctgtgatacgtcccctcacccctcaccatcaaagtgaccgtcaggcagggtgggtgccacatcctcccacaggcctttcaaggggatgaccttgcagaggggaaaagaaaaagagaggacagggtagagaggtccccaggatctccccacctgcagaaagggagcggccagggggactcccgagagagaagaccacctcctccacctctgacagccccaggcccccaacccccaggaagcagtgccctcaccccaaggagtgggggtcctggagggcctgcgggcagaggggcaccttgtgtgtctgccgtggggcccagtcccggagccgctggaagacgccgtcattgcactcgatgatccaatgctcatcaatgggcgcctcctgcacctttgacgctgcgatggccatgccaaagcccacctccaggacccggccccctgggcagacacagggcgcctggcatcactaggtggggcgggcttaggaggctgcctggaggaggggcacagggcagggcagggctggggagactgcctggaggagggggcgcagggctgggctgggggtctgcctggaggggggcgtgcagagcagggctggagaggctgcctggaggagggggtgtggggcaatgctggggaggctgcctggaggagggggtgcggggcagggctggagaggctgccaggaggaggggatgcagggctggggaggctgtctggaagagggggtgcagagcagggctggggaggcttcctggaggagggggcacagggtagggcagggctgagctgggggtctgcttggaggagggggtgcagggctgaactaggctatgtgagtcacatttgccacaggacgggagggcaccctgggccagcatggacagaggcgggcggaacacagtagtcctgagcgggaacagcgtgggccctggccagcggccagagagaggatgaccagccagggaggccgaagacggccgcttttggggccaggcctgtggggaggcgagagccttggactttgagcccagcccacgctgtttgtcccgggtcccttatctctcgggttagttacttttctctccccctccctctatccgaaagttggatttgcaagagtggccaggcaagacctggacttgagactatctgggaggggaaggactggtccccagtgggccacacatgggccccccgctcaatcctgattggcactggacactggacgtgcccattttcagggtgggaacactgaggcccgacccctggacggggcctgtgtggggccagggagtcctttcttagcagcccttagcgtctgacgccaggcaggccagggccaccccggggacagctgtctccctgagctcagctttccgagtgctattcttagccgggcgagtcggggctgctctcccaggcaggcagaagggcagcctctccctggcacgaccccttcctcccgacctcagacagggagctggggacccggttccacccagtttcacccaggtctcacgtttgaggtccccatctggagagcggggggcctcactccccctggagaggaagtttctggtacttaggcggtgcctaacgtgtgcgggccccacgcctgccgcactccccgtgaacgcctccgtgtgcccccacctgcagccccacttcccaggcgaggagacagaggcgccccggcgggagggtgggctgcagagtccccgggtcggggcagccccggcctcagtttcccctgcgcccccgggggcggtgcaggccgggcgggggctacctttggaggaggcggcggcggccagcgcgtgcatatagggggtctcccagcgctccatcaccggcttgcccaggatgcgcaggtgcgtgtccgctgcgtcgtaggccgcgggcgccgccccccacgcggggctgcagttctcgccgggcgcgaagatgggggtcgcgctgggggcgctcatgctgcaggctggacggcgacccgacctcgatcgcgcgccgcccgggcccgctccctgcaggggcttgtgggccgggggcgggtccaacaggcccggggggcggacccgcgagaggacgcgcgcgcgcggctccgggagcggcctctagcggcggccacgcgagaggtggcgggagtggggtcggggccccggccgccccctccccaaggagcctcggtgccccctctgcggagcgggcaccgcagccccgcgcccggggacgcgaacctgcaggctggggactggaatccccgccttgccgcttacgcgccatagattcctcatctgtcagcaccgcagaaaggccccctcctcgctggggtgtgagaatctgaggatcttccaggcgctgttggaagtgctttaagtgtttaaaatcatttaatcttcagaagatgctacagtgagttctgtctttttttaatagagacggggtcttgctatgttgcccaggttggtctcaaactcctgggcgcaagcgatcctcccgcttcagcctcccaaagtgttgggattacaggcgtgagccaccgcgcccgccaggttctatgatgactgtcgtttttccttccttccttccttcctttcttttttgaaagcaagtttattaaggaataaaaatgaatggctactccatagagcagccgactgtcattttacagatgtggaaactgaggctttgagaagcaaagccggtggtctggtggccacgagggtggggacccagcattagagctctgatgcccccctttcatgagcccatgtcacacccccataggctgggggtcatctgagaccccgggtccctaatgggggattccgcccaaagacgcctccagttctggagaccaggactcaatcccagcagtgccctttcctccggcggccctgcagctggggtgtgcgggggtggaattaggcctcccccagcccagggtagccccttagggtcaagcacaccccccgcctgtttcctgggggcccccaagcccgctgcggtggcgtcctggctctgatagccggtttccttccccctctgaacgtggggccacagtcatgagccctgagcactgcctgcctgcctgcctgcctgcctgccgtgcgttctgcacgggttaacagatgcagttattatgcccatttaacacgagggaaactgaggcccagagaggttgaggttcacaggttgcagcagggccacggtgtgaacgcaggcagcctcggaaacagctcccgcgcgcggccttccctgcgccaccttgtctgggtagctgcctgccccatcactgcctgctcaacgcctccacatgcccctgccacctcttgcacagctccttagccccgggccttggcacacgctcttccccttgcccagacagcctctctcctggtcaggccgctttctcgttctgtctcaagctgagcccacgtgtcctctaggagacacccccattctgccccaggacaggcatgtcctggtcagaagctgttttgtttgtttttgtttttctgagacagagtctcactctgttgctcaggttggagtgcagtggcatgattttggctcagtgcaacctctgcctcccgggttcaagcgattctcctacctcagcctcctgggtagctgtgatgacaggcgcccgccaccaagcccggctaattttttttttttttttttttttttgtatttttagtagaaacggggtttcaccatgttagccaggatggtcttgatctcctgacctcgtgattcacccgcctcggcctcctaaagtgctgggattgcaaggtgtgagccaccgcacccacccggccagaagctgttttctctctctttggtagttcactaacggaaggtatttcttcatggtcctagcgtccctctcacagggctgtcagtgatcctggcacacagaacatgcttgataggctgggtgcagcagctcccacctgtgatcccagtgcctgggggaggtgcaggggctcaggcctgtgatcccaccactttgggatgccgaggtagaaggattgcttcagtgcaagagttaagaccagcttagaccacacacagagaccttgtctctacaaaaaaaaaaaagttttaaaaattagccagggccgggcgcggtggctcacgcgtgtaatcccagcactttgggaggctgaggtgggcggatcccctgagaccagcctggcaacacggtgaaaccccatgtctacaaaaatacaaaaatagctgggcgtggtggtgggtgcctgtaatcccagctactcaggaggctgaggcaggagaatcgcttgaacccgggaggcggaggttgcagagaacatcactctcagtgaaataagccagtcgcaacaggacaaatcctatgtgagtccactcctaggaggtccctggagtcctccgatccacagagacagaacgtaggatggcggggggggggggtgccaggggctggggaggggacagggagtgagtatttcacggggcagagtttcagtttgggaagatgagaaggttctggagaggacggcggtgatggttgcacaacaatgggaatgcgcttaatgccaatgagctgtgcacctacaaataattaaaatggggccgggcgtggcggctcacgcctgtcatcccagcactttgggaggccaaggcgggcagatcacctgaggtcaggagttcgagaccagcctcaacatggagaaaccccgtctctactaaaaatacaaaattagccgggcgtggtggtgcgtgcctgtagtcccggctattcgggaggctgaggcagaattacttgaacctgggaggcggaggttgtggtgagccgagatcgagccattgcactccagcctgggcaacaagagagaaactccatctcaaaataaataaataaaataaaaacaaaaataattaaaatggaaaattttatgtcacatatattttaccacaagaaaaaaaggggaccaaaactacataccgtgtgttggatctgtttatagtcacactgggagtaaattcagatcagtatctgcacagcctttttctcgctgcctttgccctggagtggaaggaaggaaatgaatggggaagagggagaagcggagaagtagcctcttctagttctttcttccttccttttttttctttttcttttcttttcttttttttgaggtggggtctcgcactgtagcccaggctggagtgcagtggcgcgatctcggctcactgcaacctgcacctctcatgatcaagcgattctcctgccccagcctcctgagtagctgggattacaggcatccgccaccacacctggcttttttttttttttttgagatggagtcttgcactgtcgcccaggctggagtgcaatggtgtgatctcggctcgctacaacctctgcctcccgggttcaagcgactctcctgcctcagccccctgagtagctgggattacaggcacccgccaccacgcctgcctaatttttgtatttttagtacagacagggtctcgccatgttggccaggctggtctcgaactcctgacctcaggtgacccgcccacctcggcctcccaaagtgctgggattacaggcgtgagccaccgtgcctggcctgtattttaaaaaatatattatttgtaatcagcttgtgcccgacttccttctttgggccacattctgtgcatttcatccacccactgcttcattgttcatttatccagtcaccaatagatggatgtgtggttatttcaaatgttccagtcttgttttgttttgtttttgatagaaacagggtcttgccatgttggccaggctggtctcgaactcctgacctcaggtgacccgcccacctcggcctcccaaattgctgggatcacatgtgtgagccactgagcccagattttttttttttttttggcagggtttggctccgtggcccaggctggagtgcagtagtgcgatgtcggctcactgaaacctccaactcctgagctccagccatcctcctgcctcagcctccaagtagctaggactgcaggtgcgtgccaccaaacctggctgatttttgtattattattattattattattttttgtagagatggggttttgtcatgttggccaggctggtcttgaactcctgggctcaagcgatcctctcatctcagccttccaaggtgctgggattacaggcatgagccactgcatccggccagttttattttaaatggggttttagtcccagctacttgggaggctgaggagggaggatagctggagtccaggagttcaaggctgcagtgagctatgactgcatcattgcactccagcttgggcaacagagtgagagcctgtctcaaaataaaagaaaaaaaagtgttttgtactatttgtctgtgatcttgttccttgtattttttttttttgagacagagtcttgccgtgtcgcccaggctggagtgtagtggcacgatctcggctcactgcaagctctgcctcctgggttcaagcaattctactgcctcagcctcctgagtagctgggactacaggcgcctgccaccatgccgagctaattttttgtacttttagtagagacggggtttcaccatgttagccaggatggtctcgatctcctgacctcgtgatccgcccaccttggcctcccaaactgctgggattccaggagtgagccaccatgctcggcccttttttttctaagagggagtcttgctctgttgcccaggttggtgtgcagtggcgcgatctcggctcactgcaacctctacttcctgccttcaagcatttctccggccttagcttcccgagtagctgggattacaggcgcccaccaccacgcccggctaattttcttttgtatttttagtagagacggggtttcactatatatgttggctaggctggtctcgatctcctgacctaaattgatcctcggcctcccaaagtgttgggattataggcgtgcgccacctcacccggccttgttccttgtatttatttaattctgtgatgatgaataaaccaaacgatcaggctgtcaatgtgctgtgagattaaggagaaaagcagtaggcagcacgtacccggttttacaaaaccctgcgggtcacctgtttactaccgtcagcctagaccggtttttccacctccttctgctgacattggaggacgggtatcattctttttggggggtcgtcgtgtgcactgcagggtgctgagcggcatgtctggtctggacccactcgatgccagcagcaccccgcactcaagttgtgacaaccaaaaccgtgttttcagacattgccaagttatcccctagggggcaaagtcacccagaagaagaaccactgatgtatgcaattaacagatgcaactaaaacagtatttggctattaatagtaatagcacttggggggggggtcaataatatcttttcatagtcattgaatttagttaattgttttgatttgattccagttcagccccgaactgggtgaccttggccaagtgactcagcctctcggaccctcgggatcctcttctgtgaaatgcggacaggggaaggagcctcgcgcgggacgctcacgtgccgttcccgctccgtccgcccgcctggggtgcgggcgggtacactcccactccccgcagcgccccacgcggctccaccgcttccgagtgaagagttaaagaggaagcggcagccgcgcctgcgcccacagtgcctagcccggagcgccggtctcgcaagcgcgcacgcgcacgcaagcccgcacgcgcgcgcacgcacgcacgtggctcggcccgcgcgcatcctccccttgcaggggcggggccagcgcagggactccatttcccagcgtgccccgcggcaacgccaggagcctccgaggagaaaggaaaacgcgcgacggccccgactgcggcggcgcgaaatccgcctcagggacgcacgcacagacggagtacccctggacccgcccccggagaccccgtgcgggagcgcgcccgggcgtgcgcaggggcggcggcgcggcggcgcggggacgcgcggtgaccgttggcgccgaggggaggaggcagccgccgccgccgccgccgccgccgccgccgccgccgccgccgttgcgcagatccgggccgcggctgtggggagggcgacggagcgggtgaccttccggaggcgggagcgagcgaggaggcccgggagcgccgagcgtcgccgccgccgccgccatgaacaactcgggcgccgacgagatcgggtgaggacgagcggcgcgggcctgcgtctccgccccgagcccggcccgccgctccccgccgcccggcctcagacgccgccccccggggccgccccgtcaaggtcacgccggccgggggcggactcgggacccggactcgccgcggcttcgcgccgggggccctggacgggtgcccggggtctgggggggtcctggcgcccccgccgccgcttcccggcttcccgtcctgggggatcctgaaggagagcctgaggggtccggggggccccgccgccgcctccagacttcctggtcgggggaaccccgaacggcaacctgggggggtgtcctggggcgcccgtgccgccgcttcccgactgcgcgtcctgagggaccccgaatgggagccagaggggttcaggggcccccgccgccgcttcctggttgtggcggccccgaacgggaacttgggggggtctggagcgtccccgttgccgcctgtagggcttcctggcctgggggaccccgaatgagaacctgagggagtctgcggggagtccagggcgccgtcgccgccgcctcccggcttcctggccagggggaccccaaactgtggcgtggggggtggtccggggcgcccccagcgcgcgcccaaacttggcgggcggcgcacgtggcgagccgaggcgagggttccggttctgccaccgcccaacctatcccactcggggctccgggctccccgctcccatcccacccccccaaagtggtaaggtcgggaggggttcgcaaacccagggcccagggggctcgggtcagccggggcctgctgtgtttacgttgcctcggcgcctccccgccgggggtgggcttgagctgcggaagggagagtcagcgcttccgaggcggcgacgggcccgcggatctttgctgcgccgaggcgtcccctcctataggagcctgacctgctccggaccccgcggggccgggaaacctcatttcgctgtgccccagggctcggcgccattctttggtaggagcggctcctgccgcagcgacgtcgttttagagttgcattcttccggcaaaacagtctgggttgggtttcctagtggtctggtgtaaatttctcggtgcccttagctttgagcagcgccctgtgttctcagcgctgggcttggctagtgcgggagcggttgctgctagagggttgccttggcaggcgcctctcgcaccagctacaggtcacacttgtggatgggaaatgccttttgtgggctctccccctccccagacaaaacaaaagagcaccttccgttggagaaccaggatgaaagcacttagcccctgcctagcccgtgctgtgagtcctctccaggcactttgacttggcagggtccgtgtgcctgtgtgagggacattgcagggatgggcctgagcagggagtccaccggccatgggggatggagccatcgactttggggtgaggcagggaaagggctcccagatggggtacctggattaggtccattcaagccgcgggtgaacgtgggcccgctccacccaagccgtggctgtgaggaggctggagagaggtgagggctcctgtcccctccctgcatggacacccttgggaagtggggcagctggggtcccagcctgggtctggaggggtcccacccacagcacaaataggctcgcaggccacccggacgccacgggctgcgtggaggagaactggagtgcatggaccctgctctcctccccggctgccaggagtgtccactgctttctaagtcagactccttgggcaagaagtgttgccacagccgcccgtcgcatgggagaccggcttccattctatgcggagtccacggtctgctctgatcttgctgtgtggagttgttgtgtgcgtgaaatgcttgtgaccctgcgaagcgccctcctggcaagtcccctgcaggtgcggtgggtgccatgcaggagggtgctgagcttggatggaagcaggccctctctgcggcagatggcggctctcaggacgccatgggtctgcggtgtcccttacccactgggggggctcggcagcctgaggagctccctcttcctgatgcagagccctcactgctcactgccatggaggaggcaggagatcccgccggaccccgcttggagggctgggcctggagcatgcatgggtgcggggtcaacgcctcaggagacttggagcttgggagccccctgttctgggacacttgtggccgtccagctgctgccctgggaatccacacctggaaggtgggttagggagccatccttgggggaagctctgcttttgagtctgagaagtcgtcccaagttttgagggtccctgtgctggcttagaagtccatgtaaagcttgatgggggatgaaagtcagctgaggcctgccggtgataacggatgccttacacacaccgacttccagtcagcttgaggggggcttcatgcaggaggaagcgcatacgtgtggtggggtgtggggagtccctctctggatcctggtgggtttggcacgcggaccctacatggtggatgtgatggacagtgtcctcctttgggagcggggcctgtcctggtcctcttgtgaagggtgggggacaggcactgacctgtcaggagggttagagggttggcaccagcaggtggcctggagcgctcagagcacgcgcgatcaggaaggcccgagtctccagtgtgccctccctggccttgtgaagtcatcttaaagtctggcttgagcgcctctgacttggattctgggaagctgacacagcgcggccggggtcgccacatcctgttgagtagccgctgggtgctaggcgcctgggtggtagaccaggtgtcagggatagggcccatgcctggcctactggggagaggacagaggctcagaggggtcacctcgagcgcccaggccattgtgttctgctggcttccaaggcagcacacggtcatggaactggagagagaggtttatggaagattttatctggtacactggggaatggtaagacagggacacctggaaatattgtaggaaagtcacagagggaggaaggactcagcggagagaggagaaagccgcctctgggcagcttcgaggatacccaggactgtggccgggggccatgcagctcagagccaggcccatggcaggtctctgggtttattgggtggctgtggaaggagacatcctgagtggggctcctggctgggcccctagaggccgtgactacttgtacctgtgcagagtgagcacaaggcacctggcaagattgttggtcaggccagagagggccgtgatctgggggaggctgttgcagtgcggggagtgatagggaacctcatggggccgtgccggcctttctggggctctcttggtgcatttggagttattccgaggcaggtctcctgggctctgtcagcactctggcctggatcactctggggcaccgtgggcactgcagggtgctgggcagcacctttggcctccattcactccgggtcaggagtacccccagtcgtgacaaccacaaatgttcccagacatcacccagtgtcctgctggggggagagccactgtctgggagcatctgtgcttttggcctggttgcccctgcgctgggggccgctgctccttgtggtttatggcttgtcctgtgtcggctcctttgattcctgtgaatgggccttgagggtggatgtgctcctgactggctcgccttggctccaatggtctggagcaggccggtgtctagaaaggcagcagcatggaccctggcgcttgcccttcacacagcagctccccagtggcccagagctagcagcagcgcgcagcgtgcccagctgtgcttgtagccttggctctaacccttggctttgccagagagactgaggcacagaggagttgagggatgggcccggggtcaccccagggggtggaagatccggagctgggagtccacactcctccactgcccgccccgcacagagggcgctcctggtcaggcggctatgttcatggtgcgacccgtcaatctgaggttgtgctgtcttctgtgaactgaggccttttcccatccaggcctggtccccgtgacaccatgtcatgatgtcagaatccctgagagctgtgacagggcttttggcagaggccagtcattcgacagatgcttataggctgagcttccagcttggctccaggcgttgccaaggagaacactggtccgcctgggagggcggggctggcagggagaggatgagggtgaccacagttagcacccaggatgtgggcattcaggggctccttcagcacacagcagcgcgttccagttcacggaccgctcctgtgttctgtggaccccacaccctgcaggcgtgggctggagggggggcatctgaccctgctggggagagggagtccaggctatggaggggcgggctgggctcactggcctgaggcagtgggtgaagtggtcctggtttcccacctggtcttaggggcaggaaagtccctagaggctcttcctgatgctctggaagaagagaagggttccccacacatcagccgccactgggcctggacttctgcctcttgagattgtgcacggagctgagtgtgactggcggagcccagagccaggtggggtctgtggggaggcaggctcctcctggcttggtcccccggcccagcaggaagggaaaggtcgcctgccaactgcccccattgaggctgctggccccgaatggccgggctggccgccggtttttgaagcccactctggtgctgccaggaggtcagggctctttgtggtcagcctaggccagaggaagcctctgcagatggactttacgcataaataccgcacaggcacccgaatggcacgcagcaagcgaggttgccatccaaaacggcttttgctttaacaggcagaagagggtggctgcgccggccaccgtggattgagcacctgccaggtgtcgagctgcaggccctgggtgccaggcttgcagatcctgggagatgttcatcatgacctttgatgggcagactgcacgctggactccaggttgcaagggaagaagtggagctcgtcccacgcctcccccactaatgagaacaccccttttgggtttgtggggtgtgaggtctgtaggagccacgacttccagtgtcggagatgccgtcagctgggtgatgactctcccacccagcgggcccctcagaggcagggtgcaggagccacattgctcaccgaccccttcatctgcgtaggccagtgttgccttgccccgttaacgtcctcagtccacacgccgccagccaaggtgcaggctgagcaagcctggagctgaggacaagcggaccgccagccccgtagcaagcccacgagagccagcagctcctccttttggcctctgcccgcgcccggcttcctggactccgacgtttacttgtgtgagagttggttctgctgcctgggcagttgatggacagtgtctgggaggtgcctgcccagggctccgcatgtttctgatgtgccggcttctcactcacgacctggtgaggttggcagccaggagctttcttattttattgattaaaacatcctgagattcagaagtagggactttgtgccagggccctggaggcagtccctgccactgaagagatgaccctgctttccgggacttcccggaggcttctgtctgtagaccagggagaaggtgttcgccggtggctcctgagtggtagtaaaagacacatggacacaggaagctttagcgttagaagctgctctcaaatatctcaacagaaacacacagtgtggccgcgcgcggtgcctcacgcctgtcatcctagcactttgggaggccgaggcgggcgggtcacctgcggtggggagctccagacacagctatgtgaaacgaaagctatctgttgctgtctcagattccataaggactgagacttgtttcaaaagaaactgaaattctgtcttgttctcagtaatgaaagtcttttataccataattgtatatataacttctgacttacaggaaaattacaaaaattcccatatcctcttggccctgccagactcaccattggctgacattttaccctttggcacgtggtgcctcttgccccacccccagtgaactgtgtgtgtgtgtgtgtgtgtgtgtgtgtgtgtgtgtgtgtgtttagatggaccctcactctgtcgcccaggctggagtgcagtggcttgatcttggctcagtgcaacctccgcctcccgggttcaagcagtacacctcgagctcagcctcccgagtggctaggattacaggtgcgcaccaccgagcccagctaatttttgtatttttagtagagatggggttttgccatgttggccaggctggtctcgaactcctgacctcaggtgatccgcccacctcagccttgcaaagtgctgggattacaggcgtgagccagtgcacccatccccactgtgtgtgtttctactgaaatatttgagagtagctggagaccgatgcagtcccctttatgtgtacactgagatatctattgtttcccaagaacaatgacattctctcacatgaacacagcacagtgatcaaaattgagaaagtggccgggcgcagctactcacgcctgtcatcccagcactttgagaggccgaggctggtggatcacgaggtcaagagattgagaccatcctggccaatatggtgaaaccccgtctctactaaaaatacaaaaattagctggcgggcgcctgtagtcccagctactcgggaggctgaggcaggagaatcgcttgaacccgggaggcggaggttgcagtgagctgagatcgcgccactacactccagcctgggcaacacagcgagacaatttttcaaaaaaaaattgagaaagtatttattattttttaaaattgtatttgagtattttttatttttttaattttatttaagagtattttttattttttttttaattttatttaagagatgagatctctgtcacccctgctggagtgcagtgacacaatcacggctcactgcagcctcgaccttgactcaaacgatccttctgcctcagcctcccaagtagctgggactacaggtgcctgccaccacctggagtctcgttacgttgcccaggctggtcttgaactcctggcctcccgtaatgctgtgattataggcgtgatctgcgcccagctgagaaagacagtactgataccaggttatctaacccccccggccctgtttcaggtttctcagctgagcgtttctagcccttcccccttaatacacaatttttgaaatttaaatgaagaccgaaactggactggtctgacgagttccttctgccagtgaggtgggggtggagggggtactgggctgcttggaggacacctgcctgttacctggctgttgggtgggtgcagtgctgactacaggctgctgtttcttcaagtgacttggatttggtttggttttcagggttttatgtgtgtgtgtgtgtgtgtgtgtgtgtgtgtgtgtgttttgtttttttttttttttttgagaactgcttgaactttaattccaaaggattgtgtaaatgagcatttttccggtcggttccagccaggcttgggggcccttccttcatggggtgggggctgctgctggctcctgctgggtgccgggccctgctggcagggatgtgggcggggctggccctgactcagcgcgggcacagcctatggagagtgaggcacagcctatggagagtgaggcacgcggaggcctcgctcctcccacggtctctaggcctgacctcaacgctccctggcctgattgcgaagggtgcgtgggagacgtaggattttaagttaatgaggcctcaacctaagcctgttgctgttgcgtgatcagcatggttttccctgaaatttgccttttcagatctcgtctctaagggtcaggaagcacagggcggctggcacaccccgcctctaattcttcccgcctcagccctccccaccgaagaacggggctggggggttgcttgttgacgttttgaagacggcagtgggtgcctttcctgtggtgggaacatgctttgtttttcacacactaaatttaaatcagtcgttcttagggaaaaaagaaggaacagggacaagctcctggcggttggctgtggcagacacttcaccaggggctgactcgcgggggctgagtgtacaggccccaggtggtggttgatgagaggtgatgagtgtgccagccaccttgcaggggtctttcctggcgagctggcaggagcagggaggagcacgttgctcctgctgctggtggggcagtaacgtgttcaacctgacagcgacgtttttgctgaaagccgaagccaagggtggtgtggttggccgtcagggatacagggccccgcgtgggaatggtgctttcagtgaggctggcaggattcttgcggctcaggtgggagctttggcctgcacggtgttttgctctctggagaccaagggtgatgatggtgctggcactgagtcacagctgagattcagctcagggacttcatttctgaatgcgtgtcctctttcccagggaaagcaggcaggatgggagagtcgccgatagaaccacctcttccctgcctcctgggcttgggggaagcttgaatgacatctaaggccccgtgcctgggtaagccttgtggtgtctcagacatgcccagtgggtgccatggctgactcaaggtggcacagtccccattgggagttggcacagtccccattgggagttggcacagccaaggccctggggccacctggagcggcagtgaggtggaaaggtgagtgggcccttgggcgtcgctgcagggtcgatggcggacgccttgggagagctccagctcttctgcccggaggagacagccccaggacgggggtggcgcgggtctttggtgggggcaggcaggaagtgccagtgctgagactgaatttcaggcccttctcatctgccaataagagacagccccagaatgggggtggcgcgggtttgtcgggggtaagtaagtggggccagtgctgagactggagcttcagggccttcaccttcatctgtgggcctctcgttagttcgtgagtgcaggctcattgggaggcttctgtctgtgtccccccacccccgccccaggctgtaattcagaggccgtgtggcataggcttctagtttactgtgcatcatttcagatgtagacttctacattctttttcctgattataaaatactcgcaaaagctgtaggaaagcgagcctgtgtcccacttggcagcagtgcaggtgagcgtggtgccgtcaccactggcctgtcccaggaactcatcgcccgccacgcatgaggtcagcgtgcggctctgtggcacggtcctctccccatggcaaggattgggatcatctttcatgtctgcagacagcatgggcgaggctgactcgccattgctgtgagctttgtatgccgtcacgtgcacaaggacgtttgcgtcagctgcttctgtggtttgaattaagacctcagcttggcttggatgggggcatttctaaggcgagcgctgtcttgatcctgaatgttttctcattgaatcgcaggaagctcttcgtgggcggtcttgactggagcacgacccaaggtaggtggggaaggggtgtcaggtgggtactgcagatgggctctaggacctcggccttcaagttgtgtctgcccgcctcttgctactgtcttggatattttaaagtccttttgacgttgttctgatttctgggcaggggacagagtaagtgtgtatttgctctgagactgttaatttggtatttccatcccaagttacagggaagacctcaggctgcaggttcctagctccgggctgaggtggcttgtggaggcagacagctgttgtctggaagtgcagagggctgggggctggccaggctgttactgagttcagaataggaggaaagagtgtgtagcaaagtcggcgctccttggccactgccagcattcagagttgtcttgtttgccttgccttaaacgttgccttcctggacgcctacaaagtcaggttgtaaccgctggccactgctgtgctcactggcagcccctgatttacgtgaggacctcaagtgtgtgttgggcagaattccccagcgcttcccgtacaccccccacccccagtgcagcatcgctcggtgcgtggctggtggactggaggagtgtgcgtgccggcagcactgccaggcacgtgcctaatgctctggccctgtgtgtttgtgttttcttcccgatttctgagcagagactctgcgcagctacttttcccaatatggagaagtcgtagattgtgttatcatgaaagataaaaccaccaaccagtctcgaggctttgggtttgtcaaatttaaagacccaaactgtgtggggacggtgctggccagcagaccgcacacgctagatggccgaaacgtaagtgcccttccgggagctcacacccgctctctgtctcccctgtccttcctctgcttcattttttcctggactctgaccgatgtttgcgttagagtatgtttgaacgtggggtcgattgggaaggattaagccttggtgctgaggctggatattgcaggaggatacagggtgaatggagccggcggggcggggcgggccgggctgctgtgccgtggctgctgttgtgctgacaccctctttcctagagaaacagcctcttattcacaaccagctgatttgaaatttcctgcagatcgaccccaagccatgcacaccccgggggatgcagccggagagaacacggccgaaggaaggatgggtaaggggctgggccgggcggcctccttgtgtgttctccactccacgtggaaaggaaatgcgtgccttcaatctgctgttgtcgctcgttaagattgagggcgacgcaggtcttctgggttggcactcgagcagctgaggatcacccagatttatcagtgccgtgagtgttttacagccaagaaaattcttactaatctatcttagggaaaaaaaaaatgacagctcatgccactgattatcaggagccagtcagcttccctctgtgccctgtgtgccctctgtgccgggcctgccccctcccactgcctggccctcctcagaggtgggccatccttccactgccggggctgggccgggctgtgtcagctcgtgctggccactttactgctccacttgagatcccctgacgtggcaacttgggttctctgacctgcgccctggtgcttgcctggccgacagggcactgtcctggcatggggtctccttggcatttgggtctcaccaccacccacacctcaccttcctccagccctgcagttctcacaccggcaccaggagcctggtggggcggtgcagatgggaaagctcttagccccatagaacgtgctggacagtgcagacctggaggcctgctgaggcaccgggtgccagcctctccacagtgtgggcagcagggtggggtctatatgtatttacatccatctctgtccacatacaccattcctaaggaccggagggtgcgtctcctaaaatgacggccacccctcgcatgcacccaccgtcagcacgctggaaagcggctgcagggaatcccgtgtcatctgtgtccaggccgtgttcccagctccagaattgtttcacaagtgtctctcatagctggtttttttcagactggaatccaaggttcatattccatctggttattaatgtctctctagcttttcttaagatataatgggcacgtagtaaactgcaccacttgatgattctgacccatacaaacactcatgaaaccatcccgaccgtcacggcagcgagcactcaccccacgcacacactcatgaaaccatcccaaccgtcacggcagcgagcactcaccccacgcacacactcgtgaaaccatcccgaccgtcacggcagcgagcactcaccccacgcacacactcatgaaaccatcccgatcgtcaacggcagcgagcactcaccccacgcgcacactcatgaaaccatccctacagtcacggcggcgagcactcaccccacgcgcacactcatgaaaccatccctacagtcacggcggcgagcactcaccccacgcgcacactcatgaaaccatccctacagtcacggcagcgagcactcaccccacgcgcacactcatgaaaccatcccgaacgtcacggcggcgagcactcaccccacgcgcacactcatgaaaccaccccgaacgtcacggcggcgagcactcaccccacgcgcacactcatgaaaccaccccgaacgtcacggcggcgagcactcaccccacgcgcacactcatgaaaccaccccgaacgtcacggcggcgagcactcaccccacgcgcacactcatgaaaccaccccgaacgtcacggcggcgagcactcaccccacgcgcacactcatgaaaccatcccgaccgtcacggcggcgagcactcaccctcaaaggtttatagtcttttattcaaagcagttggaacaacttaaaatgtgatagccttggatagggaaaaaaaaaaaaaaggatggttggtgggtgggggcaggaggagagcagccccagccctaagggcagcccgggagctggaccagagactcctggctctggccacccagtgagcgccgaggccccgggaagtggtgcccaggagcaggcgcccttgccagtgggaggccggcagaaggggctgtgtggtttgggccagtgtttcacacagctcttgagctgctggaggtttccgtagccatcattgtcacctgctggagatgtacagcctgaaatccagcttcctctctgctcatttcgtcgtcgctgctgcctttcccctgccgtcctaaagtccctgccttcacactggagcacttttccacgtggcagtggttgtaattcggaatagctgaggcaaggcacgcactgtgtcgtgggtccgtttagctgaaatgtagctctgcagaaatgctcaatccctgtctccttgggtctctctagaaaagtgagaaagtgtctcagcagagcccagtgtctttggacttagcgggcttgtggagtgttctgctctggctttcagctgactctttaaaccagcgcggattggcctttatgtcctccgcagctcgcgggagggtttggagggttcccgtgtgaactaactatccttcccttcttcaacagcagaaaggacccaggagcgataacagtaaatcaaataagatatttgtcggtggaattcctcacaattgtggtgagacagagctcagggaatacttcaagaagttcggagtggtgagtttctccccaccccggcagcactgtggggacagagccgcttctgctcaggcctgggccttcttggggctggagtggccgagccacaggtgcacgggcctttcaggctgggagctcgctgtctcgtatttccccaacgcctgcgccctccggaaaggtggaaagcccggcctttgccttcatggccatttcgtgtcccagtagggtggttgggcggtgaaccagcctgacagccttcagggcggccgcccgattccattgtgaacaccgtggggtccagtgtcagagaagggcagttacacagaaacggggttcagtgtggcctgggcgagccagccccacagagctgactttccactgggcaggtgggagaatgcccgagctccgttgagcccagtgccagagggagctgggacagccggagggggccggcggggagccctcctagtcacccaaggcaggggcgtgtggtcaccccaaggtcctgctgggactcctgccgtgccccgcaggtcacactccgagccccgccagcaggacagccctgcgtgcctgagtactgcgcacgttcatcaggtggtacctgagggtgccacgggcctgggccaggaatgagaggcctgagcggggcctggaagagcagggtctgcagaggagctgtgtgtggctgccccgccacttcgagtgagggccgagcgtgccctttgcttcccgcgtttgggtgggaagggcttctgtggggtctcctggctcccacgtcccctgctaggatgcgtggtcggcgttgttggcccttcatgtccgtcagcacacacgtgagcggggccacgggcagcccggaggcgggtatccagacgcctgccctggagctgcttctccctgcctgcgtctggccctgggagtgttggggctccagcctttctcagacagcagccccacggagcagctgttgcccgtgcacctcccccgctcagggagggcgcaccctgtgcgagagtttgggttcgtgggaacaggctgtgccctcggaagaccacctgtggtgctggccctggtgtccgtgctgacgccaccctctccttccaggtcacggaggtagtcatgatctatgacgccgagaagcagaggccccgaggtaagggcagatctagtttgacctcggccttctccctgctcctccctcagatggcaaactatctcacccgccaggcacacacaggtggcggctgtagcaaacagcctcaggaagggacgatttggagacaaatgactaaaacgtgggctcctcatgtgcaccccattcagcctgtctgtgcttcccgaggtcagacgtcacacattgttttttggcttgttcttttgaagtttttacgacttgtcatgagtctcggcctggcttctgtttttcactgtccggaagagtgtggtccttctgcatttgaccttccttcaccctcatccagtcctcccagtgtggccggtctcatttcgtgtcgtcagctgggtcagctggctcggtgtggagtttggattttccgtgatccatcccatgctttttttttctttctttcttttttccttttcttttctttttcttttttttcagttttctcccctctctgaagtcagcagggcaggtgggaggaggggtgaggagtcacctcagggcctcccctcattttccctcagcttcttgcacacccatccatgctggtttgtggagctgggacgatgggcgcccagtttctgtgccccttttccgtggctgctgctgtctgtcccgcccgcccgcatggttttggttcatcagctgcttttggccggccacgtgagcagacctgcagcctgggtctgcccgccacgtccgtgccgcccccgcaccaccggcccaggtcagtcggggcagccccgagcgccaggtggcgccgcagcatgcccaccatgctggagcatagtttgccatttgaacctccctccccacggttaggagtgctcctcctccatgtcggttacgctgttaagtcttagtcgtaacttaatttagacatacatgcttagtgacgtacttaagtgtttcatagtaaagtacagtgatgttaagtaagctgtttttccttttctctctgtgaattgtgtgtgattaacgatatctctttagatttctcttctccaggtgctaaattatatcacacaggtacaggccagtcccgcagtcagaggagggagcggctttgctccagtggggtgtaaacgaagtttcaggtgtttctgtcccgcttcctcagtggtgatgtcgcctcttgacagccgcattcctagacagcgctcagggcgcctcccccaggacccagcgcctcttgcactgtgcccggaccaggcgagccctgtggtttcagacactcctgcagtttgcgaaaatgtctacttctaaatacgttgtttcatcaccgatgctgtgttccaatactgcctctgatcttgggaaacttgagcgcgcgggaatctgagggttgcttctagatcctcccggtccccctccggctgcccagagctggcgccccttctcctcgcgtcctgtcctgtcccgtgtggacgggacgtggcgagtgtcgctgagtccacactggtgtacagagcacttcggggccagcacgtggccacatgtccttagctgttgggctttgaaagtgtcccttgggtgtcaggcgagtggagggccggagagacgctgcggcgctgcttagcgggtcctcccagagagtgtgtccccttcccttggcctttctgcatcttctgagacgggtctgtgtccccctccccgccacctcctccctcttcctctccactgactgaaggtcatggccatgtccctgtcagggaccccgcctgtgtctcgggcacacagtgtctgtgcgggtccctgcttggccctcccacgtctaccctcggcccgcccgctccagccgctgcctcgttcgcctctcagtcccctcaggtcttctccatcctgcgctcctctcgctgtgtgccttgccttcctggtccctcctcctcttcctcctcctcttccccctccccctcctcctccccctccccctcccccctccccctccgtctggttgcagacactgcgtgcacagtcacgctcaggtgcacacgtgtgctcaggacggtgggaggctcctgaaccacagtgacctttgtcccctcacagtctgagctgccctttctgccccgtttccatctttccccgcccccagttttgcttgtcctgtttctgcctggtcccagctacagcagccctggcccctgtctcttcagcttgagaggccccacagtaggctgctccttccgggggccgttgcctgttcccaccccccacggcccttctctgccgcgctcgttcacgcctcacgcccgtgctgcgctgtcccctgctgtgtggtgccttgtcacgcaccctgtgcctctggcgcgggcagcccatcttcagcccggtctcagctcttcccatgtccatctttgttctgtgaggtcttgggcagctgtctgccgggcacttccatctggggaggggctggtgccgcctgggccccgcctcgggaggacggtgtgctttgcggtgtcacgctccacctagccggggaggcctggagagcccggcgcactcctgcgcctagaggaggagacccgccccgttagccgggggccgcgcccaccccagacccactaaacttcgtttatactgccactcttgtgtttgggaaatgctaaattttttttgcctttaaaattttctgttttgatcccatggtgcatctcgctcttgctgctggcagcagagtctgacctgctggaacccgttgtggcctgtatctttgtgcattgtttctctacctgtatagaacatgcatagatgtctacgatatgacctcttctaggactccttgggcttacccaacggtgttgcgtaagcctagcgaggcaccagctatgatagatactgtatctgttaacgctttagaacgatatatggctgctgtcagcactagctgcaaagcaaattgcaagccaagggggagaatcctgggtttcagagaagcatacacacatccacggtgcacacccctgactaagatggcgcattccacgcgggcccccggcctgcagggttcactggcaatctccccacaggcgagagccagaatattcaagcacgggcctctgaccctcccctggggggcgctttgtctgccagtagcgatggaggccctcaccgttcccctgtctccgctgctgttttataagatgtgctccttgttccaaatctttgtgacacggagccccagcccggggtgtctggggcggaggcttgactcaggcctcagtcagcagagccgtcaccgggagtgcggacgtcaccgtctgtccactccgtgtgcagtcgagtggtggctcctggggagggaggcagctgccccaggggcccgcagcgccccacacacagcttagctgaaacccaaggtcgatccctcggcccgtccctaatactgttcatcatcctgttttgtgtcacaacaccctgctaccttgattcactcttcgtcgttggctaggttttggatttattactttcgaggacgaacaatcagtggaccaggctgtcaacatgcattttcacgacatcatgggcaaaaaagtgtgtagttgtagttttattttaccttaagaccaaaccaagtcttaggcaacttaggggtttcactggaaaggaacattccttcacggaaagggtcgggcgagttcgtcctgtgaacctttgctgcgtgaggtgggcctgggtctgtagacgtgaggagggtcccatccttccccagcacccttcctgcggggtggggatctctcagctttgctcctggagcccctccctctgggtgacctgggactgggcgggtagggggctggggctgggaggctgtggcggtgttggggctggctccagtgaaaccgcagcgttgcctcaggcttggtttccacgaccactccttcagatgtctgcaaatccccattgtctgacactgacctgtaatgtgatcagcaagggacctttgagagccgaggttccgcttaaaatggaaagcacagtggaaacatcatgaaggactggttgtttgaattgggtcacttactgtggaactccggcaccagccacatgctctcggtagtactcagccaccatgcagtcaagtgacctctggttgtgtcatcttcatactgtgttacccccggaggtgagagggacaggaggccacccccccaacccccaggccagcccttggaaggcatgtgtcagaaaggggtccctaaatccttgttttacctggacccttggaggttcttgagaagtggactctgaaataaataactggtagaaattctacagtgtggaatttcttgcagttagcaaaagcttaggggtccaggtttttgcaggattcctgtcttggtcctttcaaaccaaggagctctgctggctctgccaggccgcctcacatgcccagtgggattctgacccggcctccttggtgcggcagcttctcccgttaacggaagaagacgcttagcccctctgacagggccatggttgttttttcaattaaaatgtcctggagggagcatcgtgctcattatctcctgcccctgccctctaccccagccagaggtcttgatagcagaacttttttaaaaacagtagcatgtgtagttatttttgtatacacgtggcttagattgggttgcagacttcattaattccatttgaacccaactaaaacaggagacacaatccttgttctgacatcgagtgcagcttgtggtttaaaatgagcctgccggctgcatgggtgcgcgacagtacaagcagggcttcaaggagtctgcgcccagtgttttaagggactacgacactgacaatttggggaaagcgtggtcttgatatacggggcagaaagagctctgtacagtgcacacacctgctgccgtccctgggcagcccctgggtccccccagccatgactgttctgcgcgagctcctgagctgggcgacctcagtgtgggtctcgccttccaagccagacagtcgttggagtccagcttgcccggcgccggccttcactggttggctggagcggcacttggcgtcgccgccggcccctcatgggggttttccgtttgtggagtgtttggtaccgcgtggtagttaaccctccatgccaggcgactgcattgctgcattcaggtaggaaagggtgaaagaatttttttttgtttttgtttttttaaagtacaaggaccgctctgctttgtaagcaggaaccgcagtcccctgaggagggtgtgtgaagactcgctcatttgagttctttgaaatgggtcccttggtcctgctgtcacattgccttgagctaacggatcctgttcccatcataggccggtccttggggcattgggcaggtgggggctttgtgcctctgtggctgctgctgtctgttctctaacaggcagaactgagggattctgaactcaggatgtgcagctctccagactgagaccccaaggctgactccaggtggatccattgtctctttattctcattacgatttatcagaaaagtgagacaaattcaggattctcaaatgctgaggcagccccggaattggggggatctttctgttgttagtccacccatattttcaagcaggcattaaaggaaggtcagccactgcgcctagaataagtaggtcaggcctgctccatccattgtccccggccccgcaccctcctcctgagaagactgtggctcctgacacgtctagagaggaagggccccgggctgctgagcgaacacagtatgaagattgcttactgatccaaatgtccattttattgcatgtttgttactttttttgttagatgtaatgtaagattctcttatcacatccattccctctgacattagttttgagttaattgagattctttaagcgttagcctggggaaggtaagtctttatcttccattagacattttaaatttaaaaatctaagtaaaacaccagccgtgtttctcaggtatgagttaaaagcacaggtgggcgggctccaagcagtccagagggcgatgaggatgccgattgctgggaagatcctggtccctttttgtccccatgttttcaagaggaaggaggacgctgccattttacttgagtgaaagacccttcgtcacgcacgaaacccccgagggctctgggctcggtcctgctgccccgcagtgggcgggctctgtgtgtcttacggttgcatctgttgtacctgagaaacattttttaaacaaaaaaattcaacacaaaagaattttttaagaaaaaaatgctactggcctaaataaggtttatagttaagtatttagtcttaagttgtaagatgctaagtgtagtcataagttacccgagggtgtgtctaaagggaagggggtgctgggacccgcagcctcgccctaaaccagagctcggtttgtttaggtggaagttaaacgagctgagcctcgggacagcaagagccaagcgccgggacagccaggtgccagccagtgggggagccgggttgtgcccaacgctgccaatggctgggcaggccagcccccgcccacgtggcagcaaggatatggcccgcaaggtaaggctgatgcagaggtgcccacgggaatgtcccccttctcggacttggcccgcgcgccctgggctgtgccgtcgctgcggcctccccacctctgctgtgcatgcacagagccgcggttcacagtgtccttgagcccccgcgaggtgccggctgacagccagctcccgggcagcacccgcagcctcctcagtagcggggtggccacggcttaggtgcccgtccggggcctgggactcattgtcaccgggaagagctgcagtgagcgtctgcacctcgcgaccgtgtgccacggcaggtctgagcacgaaaccctgagagggctggcattgccaagctgagctcagaatcggggtgctgcccctggggggcttgaggagccggcaggctttggatccttgccacctgccgttccctctgcagtgccgtgggccctctgtagttaggcccacgttgtgggccgtccttggagcttccagcagccacggaacccctgggcttggctgcagcccgacccgagttgtgggtcagggttccagatgtacgtcgtccgggtcccgagactgtggcttccctgcacctcgtctaaaacctttttctctggagcctcccttgttggaaactcggaggtgctgtggggactgtccctgccctctcgaggcttagaagtctcaggtttctctggggtcctcaggtggagccgggaggtcacccgtgccccagtcagcagacacagtgcccgccacctggcagggcacagaggagagtggctttaaggcctgttctacaaggggtggggagtgcttctctgctcagggttcagagggctctgccctcaggacgaacaggctctaagcacaggaggctccggggttggtcccagcccttgacgtccatgctctgcggctccttctctgcgtcggacagctggtggacacggcgccaacctcctcttctgttctcttatctaggaatgtgggtgccggcaggacaggcgattggtaagtccttgtttatagagcaaaggcggggacagaagccacatggcaggctgactcgccaggtgtcctggggcagccggcaaagcctggttcccgtgtcctgagtgctggagaggaagagagggtgaggggcctgctagggcccctggcaggcctgggtctaactgtggccagtctgtgttgtccagcgctctctgtccatcacccccgtactgtgtgtttcaggtggctatggaccgccccctgcaggaagaggagcccccccgccacccccaccgttcacctcctacatcgtgtccacccctcctggaggctttccccctccccagggcttccctcagggctacggtgccccgccacagttcagtaagtctagggggccttgtgggagggcctcccgcctgctccggagatgccaggtggtgggcggggtgatggggagtcttgtgttacacgtctggcctcagccacaggtggggtgccggctggtcagcaggtcacctgccaccaggcccttcacctgcagatgggctccatcgcctgtggcctcgctggttaggctaaagggcagcccgggctcctgcgggttggagagctcatagcaggaatgtctgggcccaaccagttctcacaggctcctcaggagacagagcctggacttcgtgtcttagcctcatacttcaggattaggggggcatttgtttaagggtgtacaagctctaattgttttttttttttttttgagatggagtttcactctgtagcccaggctggagtgcagtggcgcaatcgcggctcactgcaagctccgcctcctgggttcacaccattctcctgcctcagtctcccgagtagctgggactacaggcgctcgccaccacgcccggctaatttttttgtatttttagtagagacggggtttcaccatgttagccagggtggtctcgatctcctgaccttgtgatccgcctgcctcggcctcccaaagtgctgggattacaggcgtgagtgactgcgcccagcctcacaggctctaattcttgactaattttcctgtacacgtcacttgtaattgaaaagctgagtgtaagatcagccgacacacccagagttttattttattttatttatttatttatggtttttttttgagatggagtctcactctgtcgcccaggctagagtgcagtggcgccatctcggcttactgcaagctccacctcctgggttcacgccattctcctacctcagtctcctgagtagctgggactacaggcgcccaccaccacgcctggctaatttttttgtatttttagtagagacagggtttcaccgtgttaggcaggatggtctcgatctcctgacctcgtgattcgcccgcctcggcctcccaaagcgctgggattagaagcgtgagccaccgcgcccggactattttatttatttttttgagatggagtttcacttttgttgcccaggattgagtgcagtgccccgatcttggctcactacaacctctgcctcctgggttcaagcgactctcctgcctcagtgtcctgagtagctgggattacaggcgtctgccaccacgcccggctaattttgtatttttagtagagaacaggtttcactatgttggtcaggctggtcttgaactcctgacctcagcgcatccagaattttagacggggcccccagggtgaggtcttggcaccctccagtagagaagaagggacatgggccatacgtggggtgtcctttctgggagccttgcgtcccttacctgcctagccagggattgcacctcacagcacgcagccagcaggaacggcaccgtgatctgatttcacctgcgggccctgggccctgggggtgtttgacaattggggcatatcacagtgtgagctagtcccgtctcgggggtttggaggctccacgtggccgtggtacaggagcaggcagttccatcctctggcctggatcaggctctgcacacggaggcctgtgggccagatgactgacaggaggggagttgggtggaacctcggcctgcctgatatccagcaacagagggcaagggcggcagcacctccagcatgacagtcccttccaagcacgtcaggatgctcccttgcctgtgctggcagcttcctaaacatggggactgggcatggtggcaggtttttgtccttctgaaagagcaattttgctgtgaggttacttgctccttgagttcttgtctgaggcccacctggcggctgctccgtgaggaacgaggtggccctgctgcagctcagcatcccgccacgctcccaggagtgtgtgtttcctggggggagcggcccgggaccgtggctctgtggtccattctgtggatgtccacaaggcctgggcgttctgtgggtttgggtggcagtcccgtctgggcagctcctgctgggctgggtgtgggtctcctgctggtctgcccccagctgcacaacgtgtcttgtgccttgccctcttgtacctctgcaggttttggctacgggcctccacctccaccgccagatcagtttgcccctccgggggttcctcctccaccagccactcccggggcagcacctctggctttcccaccgcctccgtctcaggctgccccggacatgagcaagcccccgacagctcagccagacttcccctatggtcagtatggtaagtggtctcctgccatgccgcgtccccgctggccccaggaccctgggcacggcctgccttcttctgcttcctcccctgctggacgctccccagcctttacctggtgggaaaggggagagggaggagaggggggtgtgggggttgttggagagatctcgtggcaactcgggtccagcagaagggagcgtgggagtcttgtcgcagcagagcactcgtcatacagcaggtgctgcagggcctgcatgtgtgggaacctgagtggcgactgggtcgagggaagtgagtcgcaggcagctgtgatcactgtctagaggttcaggccctcggtgtgggtcccgggtgcactggccccttggtgggttccagtttctggcgtcatcagcctcctgctgggtccagaccccgcttggggcagaagctgggtctgtagtaggcgtggcctggacgtgggcttcaccctggactggatggctgtcgtggcttgggtctgcctggacgtgatctgcaggcagcgcatgtgcttccggggcaggagcttgtgggggggcggggtcagcatgggtcaaggtctgcatgtcagtagttctcgccctgcactgagccaggagtcacagcagccttgctcaggaccaacgcggtggcctcagtgggcagggctccaactacggtcagctcctccagcaccaggggtcattcacaagcagggtttgagaacatggggcacctgtctgcaggtggccacgggcttccggggtgcctgtgaacacgcttcctctaggcctggtggaggccggggtgtgggagctgtgttcggccgaggtgcccgcccacccacctcgcatggctgtggttcccctgcccccacgcccaggccttgggccgaggttgccgcatgtgtgggttcttgacccactcaccaccaaaccctggcgtgtctgagactggcaggggggtgtgaggcgcccggttggggcgtggcgtgtgtcagccgctgctcttggtggcggctgcttgggttggtcaccctggtctcgtctcttgccaggcctgggttcctattctccagccccgccgggctgcggcccacactttgtttacagtcttatggtcaggctgagcagtgatgtggcctaggtaggtgccgcctccttctccagggtcctcccacccgcctgcaccgggaggtggacgtggcttcctctgccgtcccgggcgggggtggacgctggcggtgccctctgggaaggggcccttgccggtgccaagacattggccacaagccttcagcgggcccaggatcccccagagagagcccacgcccacctgtgcccacgtgcacccgaatgggaacccagaggtcgtgggaggggcttcctgcaaggtgtgcagcggggtggggagcggcgtgagcagctctgtccttgtaaagacaccgctgtccatgctcctgaggtcggctgtgtgggccggacgggctgcagggtgtgctggcccctcagccagtggtgtcactggggcagtcaggttgggcccagaaacccttccctgacacgtgccaccgatggacgtgccctgacaggaaggacaacgtggggtctggtctgcgacggaggggcaggccctgtatcgctgcaagggcccgtcaggggttttctgaaactccgagagccagctttctagaagcctggtccaccgtgccttgggccatgtgtgtctccaagccccgaggcttctctacctcccctcacccccccaaccacgtcttcgggattgaacagggaagcggtgaggttacgtgggccatggagggctctggaagccgcttttctctgtgtgtgcccctgctcacatgtttttgagggagagaacatgcccggggtcctctccccggcccaggtgctggcctcagaagggccccacccgcaccccgtgggacccgtggactcaaggcaggctcggcggagctgtgtccaggtggcctcgctcgacggcagtgccaaccgcccagggaccgccccgagctcacaggactttctcccccagcaggttacgggcaggacttgagtggcttcggacagggcttctcagaccccagccagcagcctccttcctacgggggtccctccgtgccagggtcggggggcccccccgccggcggcagcggctttggacgagggcagaaccacaacgtgcaagggttccacccctaccgacgctagcccgcggcgccgcgacgtctgcacggcccagacccaggattccaaacttgtgaactcgtgacaatcacaaacttggcggcaaagtggcgactcaaccttgggggggggggcggggggagggcgcgaggcttttggagcggctgtgggtgtcgtctggactgaggtttttaaatatttctttctctaacccatcagcacaataaaaaaaagtcactggttcaacaacagggtttaaaaaaaatgtcttcagctttaattcaaaacttcaggtttctttttcttccttttttttggaaattattttcctgagccttttgttttacggtatattgtaaacttttatgttaaagaaaaaatatacatttacaaattgtgagatttttaagagaaattttctacgatgtatactggcttattttttaatttaaaacggggtttccgtcggcactggtggagggggtgcgctgttagtcccctcgctcctggctttgggggttgggacttggtggtccagaaactctgggagcttctagaagaaatctactgagtgtatttctgttttttgtttaattccttgcttttgtcgactgacctgcttggtagtgtctgaggtgaactgtgggggttgcgcacagccagccgcgtggatcccacgcagcgctgaaccgaaccgagtaggaagcctttctccccaggcacgtggcttcagggcgtttcccattgaccagtttgaccctggtttgaataaagagaagtgcgtttggattagaaaccactttgtgtccgttttttccctccttggtcttggcctgtgcctacccttccagtgcctaggaaaggtctgaaacgcgacggaggcgccctcgccctccccttggctcttggtggtctcagcaaccccgagggcttcagggcagaggctgagtggcgagctgggcccatccctcagtgggtcttgggatgctgtgactttgaggatgtggccaccaccagttttctcggggaatgtgggctccaggcttttcccatctcaagacctttaatcatatcttttgccatggaaggtgacatatccccaggttctggggattaggacaggggcatctttggaaagggatactctgtcactgtggcagggaaggcgagacttaaaaagggccgggcgcggtggctcacgactgtaatcccagcactttgggaggccgaggcgggcggatcacctgaggtcgggagttcgagaccagcctgaccaacatggagaaaccccgtctctactaaaaatacaaaaattaaccgggtgtggtggtgcatgcctgtaatcccagctacttgggaggctgaggcagaagaatcgcttgaacctgggaggcggagcttgcagtgagccgagattgcgccattgcactccagcctgggcaacaagagcgaaactccgtctcaaaaaacaaaacaagaaaaaaaaaggaccatgaagtcccaaactggaagcctacagcgtgccaggcgtgagactgttcaggcgacagccagaaccacccccccccgccccagttcatattttggggacagggaaggtttgacttagtttggagagaaccaagagaaggggtacccccaacatccctgtgcagtgcagtttcctcactgagacagtacccctcaacgcctcagcccaggaagccagctccattccctgccgtcagagccttctcccatgtcctcaggagctgctgccccagctcccaggagggccaggcgggggcggctgtctatccacaccacaggtcatcatggtgttgagtgtcagcccctcccgttacattagctcccccagccaaagagcagcactcacaaaatcagctttccagccaggacactctgctgcaggaaaatgggtaacatggacgggcccgacacataggtcctgtgctcctcgggacggagactcagccctccctgagtacagtgtaattggcttcccttgggactgtggggacggctggggagagctcagctccctggacagtgccacagctaagctcgggttcccagaggttttgtgctttttttttttctttttcttttttttttttttttttttttttgagaaggagtctctgtcgcccaggctggagtgcagtggtgcgatctcagctcactgcaacctccgcctcccgggttcaagcggttctcctgcctcagcctcccaaggagctgggattacaggcacccaccaccacgcctggctaattttttgtatttttagtagagttagggttggtcagcttggtcttgaactcttgacctcaggtgatccgcccgcctcggcctcccaaagtgctggaattacaagcataagccaccacgcccagccaggtgccacatccatagttaatagtcaccttcaactttatacttaattccagtaagatacagaaacatcactcctaggccaggcgcggtggctcacgcctgtaatcccagcactttgggaggccaaagcgggtggatcacctgaggtcaggagttcgagaccaacatggcctggccaacatggagaaaccgtgtctttactaaaaatacaaaattagccgggcacggtaacaggtgcctgtaatcccagctacttgggaggctgaggcaggagaatcgcttgaacccaggaggcagaggttgcagtgagccgagatcacaccactgcactccagccagggcaacaagagtgaaactctgtctcaaaaaaaaaaaaaagtcactcctacatagttctagttactccttctctttgagctatcattattcacattacatttacatatcttaacaaacccagtgatattcctaactttatttttgaggcagggtcttgctctgtcgcccaggctggagtgccgttggcgcgatcacggctcactgcagccttgacctcctgggctgaaggctcagcctcccgagtagctgggaattttttgtactttttattcttttatgtccgtgtgtacacaaatttttgtatttttttgtagagaggcagtctcactgtgttgtccttactaactttatatacaaaattttatctgttaaagccggaatggttcttttcagcgaggccctgtccctgctccagtatctgtaatgaattctcgtgttcctcccacagtgggacctgaaccgccaaaccgcacctacgagcaaacggtaggcgctccataaatacttgttgatgtgggtgccatcgtgtagatgacggagcacgaacccgaggctcagacaggggcggcgacttgtccaaagtcccactccgtggaggaagcggctctgcagacctcaggcggcggctgctctaatccctgcagcctgtgttttgccctccagacggcagagggcgcgtgttcgccgccgggaaagcggaagcgcgtgtgcgcgcacggccgagggggcgggacatgccggcagtctcgcgataactgcgcaggcgcggaccaaagcgatctcttctgaggatccggcaagatggtgagtgttgcgatttggcgcgtctctgccgggcctatccggctccatccaacctctgaccgtctcgcgggggccgcagttcgtccccgcggctacggcggcttgctcccgaccctgcaggcggctggatgttggggcgaggggcggacttggtgggtgtcgggacgacgcggggctgggaaggcctgtccgggccttcatgtccgggtcctcgtaacccggagccgcgagtgatccccggggacgggtcgaagcggtgtgtccctgtcgggcttctgtccccggcggcgccgcgcgtcttccgcggtgtcctcgggcccggtggccccgggagatgggtgtcgggatcccgctgacgcccgatccgcgcccgcacaggcagaagtagagcagaagaagaagcggaccttccgcaagttcacctaccgcggcgtggacctcgaccagctgctggacatgtcctagtaagggcggccgcgggggtcgcgggcaggggctgggccagcggtggggcttgtccgggtgagggcggcggggcgggggtccaagcgcctctgcggcggtgggcgggcacggtctccgcgcgggtttggaactgagtgtggtcttgcgcccagaaaactgtccagagacgttgaggtttttgcttatttgcaacctgccccccgttgttcacttttccgcggcttagttggaaggtgtagcccctgtctgtagcccacgtgacttagaataaggggctgcgttagactccttagattttaagggcggtggaggtcgctgggtcctttccaggcagggtggtggtgggcatctggcttgcgcttttattttttaatttttgattattttgaggcggagtctcatcctgtcgcccaggctggagtgcaatggctccgtcccagctcactgcagcctcccactcccgggttcaagcgattctcttgcctcagcctctcgagtagctgggattagagggcccccccaccacgtccggctaatttttgtatttttagtagagacgagtttcagtgttgcccaggctggtctcaaactcctgacctcaggtgatccacctgcctcggcctcccaaagtgctgggattacaggcgtgaacaccgcgcccgaccttgatttttgattatttgtggaaacagcgtttctctgtgtcgtccaggttggtcttgaactcctgggctcaagcgaccctcccgcctcaacctcccgaagtgctgggatcacaggcgggagccactgcgccctacctgccttcccctgcgtttttagaggcctttggcccgagctgtacgctgcagcaccttgtctgaggctgtggtctccgggccgcttgttctctctgaatctctgcagtcacacggtggctcttgcatgtgaggggtgagtcgcgcatatctggcgggggtgccagagggacttggcgtgttcattgtagtcactacaatggacagtgacaggtccactgcggctctgtccctggagagaaccaagccttagttctctgtccgccggagtgcgtagggtctccccaggccgggccgctcacaaaactgcctggtgcatcctccccagcgagcagctgatgcagctgtacagtgcgcgccagcggcggcggctgaaccggggcctgcggcggaagcagcactccctgctgaagcgcctgcgcaaggccaagaaggaggcgccgcccatggagaagccggaagtggtgaagacgcacctgcgggacatgatcatcctacccgagatggtgggcagcatggtgggcgtctacaacggcaagaccttcaaccaggtggagatcaaggtgtgtgcggccgtccctgccggctggggtgggctggggtcgcctgatgcaggcgggatcagctgacacccagctttgctcttggtctcccgcagcccgagatgatcggccactacctgggcgagttctccatcacctacaagcccgtaaagcatggccggcccggcatcggggccacccactcctcccgcttcatccctctcaagtaatggctcagctaataaaggcgcacatgactccagtcctttgcgcagcttgttcttcctggcgtcccgagctctgggaggggcctgggcctgcttcaggttcgtggtgtgaggaggttcaggttggacgttcgggggtgtgtggtagtgttgtgtggatggtctcttggtgtcgaagactgacagctgtgcgggccctgccccaactcggctgcccctgctcctgtctgcagggacagctgtggagctgggtgcccaagcccaggtgtgtagctccgtcccttttggccccctcagcgttcttgacctcggggcagctgcctggcctcactctgtcttctgggtacctcacgtagagggggccactcctgggctaagtgcagcccctcaagccctcacctggcctgggctctcctttctggcttccctcatctcctgtggagggttcccgcaggaagtgaagcagcagcaggaacctttgggccacctgagcccctcccttctatcctcacccctgcttggcttcttagaagctcctgactctcctcctgacaccacgctgctggcatctcctctcccagcaggctccatggctgcagccagccccatccgcccagcctggggctttgtgtccgggacagagccgtgtcccgtggttaggctgcaccatccgtggcctggccagctctgtctcctttgcacagaatgcttgaaagaacaggacaaagtggctgtgcctgtgggtggggggcaccgtccagccctccatgggctctctgatggccgtacgtgggttggagaacatggtgagaactaaccccgttcaatgctggagtcacctcagcccagaaggtggtaactttgctcactaagcacccagcagagtggcccagggatgtggggtgggcctccccttgggcagtggacaggagggtgagagctcagccaggcagatgggggcaggggagatgtgaggagccccaccttcaccctcaaatggcccacaacagcctcctgtgggccctcttctataatgtttctccacttttttttttaaatttgttgcccagccggagtgcagtggtgtgatcatggctcactgcagcctaaatctcatgggctcaggtgatcttcccactgcttcccaaagtgctgggatcacaggcatgagacactgcagctggctatatcttcaaatttaaacatgatttgcagccaggcgcggtggttcacgtctgtgatcctagcactttgggaggccgagatgggtggatcacctgaggtcaggagttcgagaccagcctgaccaacgtggtaaaaccttgtctctactgaaaatacaaaaaaattagcctaactgggcatggtggcatgcggctataatctcagctacttgagaggctgaagcaggagagtcacttgaacccaggaggcggaaatcgcactctagcccgggcaacaagagctagactctgcctcaaaaaaaaaaaaaaaaaaaaaccatgatttgctcgtgttcttacctctcgatttggaattaagttacattacagagaaagtgtgggtccgtgtttttctctctgtttgggaaaaggtgggttggacagaggaaggatggcccagggttataagcttggctccagtacagccgggagacccccaggcagcatgagtcggtgggactggacctgcctggctggtgtccagaggggcccgtagccagtgggacggtgctgcacgtggtcgtgcctcaagccctccactgcaccgggcgccctggccaaccctgccaggaagtaaggagaccggggaggccactgagggcctggacctggctgggtagtcagaagtgggggcaagtcttggctggcagcccctgagatgtgtagaatgtttgaaaattcgcctgtgggttgacctgaacccaccgggcttgaaaccaacggtccaaagtttggagtgtggtcttaaggaaggagaccactactactcctgctgccttcctcccaccaccttgcctagttcacaagacaggaggagagaaaatgcaaaaagttggaaaaaaaatgcaaaagtaagataaacagacaaccttggcaccaccacccggccctaggagttaaaaaaaaagtaataataacatcaaccactgacctaaactacttgtgttatctgtaaattccagacactacgaaaaagcattgtaaaactttctgttgtgttagctgatgcatgcagcccccactcacgttttccacacttgcttgatgtatcacgaccctttcacgtggaccccttaaagttgtaagcctttaaaaaggccaagaatctctttttcggggagcttaagacgcgagtctgctgatgctgccggccgaataaaaacctcttctttaatccagtgtcaggagttttgtctgtggctcatcctgctacagtctggctgctaggtggccgccggaggtctctgggcagcactggccaggttcacttcagcgtgaacagcagaagcttgtacgggacccagcttcgaaggcccaccccaggtccagctcaaggagagggagggaaggcatgtgtaggcagggttcattgtagtctcggttgtcagcattcagaattctttttattttttgagacagagtctcgctctgtcgcccaggttggagttgagtggcacgatctcggctcactgcagcctccacctcccaggttaaagcaattctcctgcctcagcctcccgagtagctgggattacagaagcacgccaccacgcctggttaatttttgtatttttagtcgagacaggatttcaccatgttggccaggctggtctccaattcccaacctcaggtgatccgccttcctcggcctctgaaagtgctgtgctccagcctgggcgacggagactccgcctcaaaaaaaaaaaaaaaaaaaaaagaaattgctgaggtgttaggtgcttttcgcctcagataagcaaagtgggaaattagtggatgtcccactgaaacagctttatctgcaacatggttttcaaccctgagccttagaaatcaaaagtgccggaaaccatggtgcacacttgaagtctttaccgaggccccgtctaaaaaaaacaaatggagccgggcgcggtggctcacgcctgtaatcccagcactttgggaggccgaggcgggcggatcacgaggccaggagatcaagaccatcctggctaacatggtgaaaccccatctctactaaaaacacacacaaaaaatcagctgggcgtggtggcgggcgcctgtagtcccagctactggagaggctgaggcgggagaatggcgtgaacccgggaggcggagcttgcagtgagccgagatcgcgccactgcactccagcctgggggacagagcgagactccgtctcaaaaaaagaaaaaaataaataaatggaaatgacagagcttttgagctaccaggtctatctgcagagcaaatgacacagagatgtgtggggccgcgcccatcatgaggcagctagctgggaacaagccccagggggccctccctgaggaaagcataataggaatgggtgctgggcctcacttcgcttttgcagagctttactggcacccagctgtgcccattcatacctgtattacttctgccaggcagacgctgaaaatttactgtctggacctttacgggaagtttcctgtccataaaagccctccctgcacacgcccctgctggctagcacgtggctgctaatgggtacttcccttggttttctgcagttggaatccagcatgtgtgatcagggaaaatatgtattagtatttaaagcaaaaagatacccccagttcagagagacacatgtcttggtggccaggtggtgccctaggtccacaagaatttggggggtgtccaggaggtggggtgggagcctctaactagcactagggtgccactgtcgagggccactcccaactcaaggcccaggctctgtctttaggcctctctggccatatccgcacttcttttttttttttttttttttttttctgagacggagtctagctctgccgcccaggctggagtgcactggcagaatctcagctcattgcaacctccgcctcctgggttcaagcgattctgctcagcctcccgactagctgagactacaggcatgcgccaagacgccggttaattttttgtatttttagtatagacggggttttgccatgttggccaggctggtctcgaactcctgacctcaagtgatccacccgcttcggcctcccaaaatgctgggattacaggcgggagccaccgtgcccggccccacgcttctgtttctaccctctggtcccacaccccgctccagaatctgcatggactctcccagacctgcccggccccatctgtgccgtctcagacagacagctccgtcctcatcaggttcaggtctggccccggcgcttgcgggtcagctgccttcaggccctgtcctggttcccggcgcttctcacatccccgcggcctcccccctggacggcagtttacactgaactcggcgccctcccctgacttctgaaggaggagtcctgggtggccccgaagcctccccggcagccgcacggctccgtccccgctccagggttcagctgaggcacctgctggaggcggcctgtccccgccgccctgctaaagcggcgcccctttctccggccgctcgttctttggtttccagggactttgcacaattcataacacccctcttagcccccatcctgcccgggccgcatcttccgcccgatcatccggccctcgacccgcgcagccgcctccgccctcctctcccggcaccgcccacggcctgttctccccgcagccgccagcgggcgcccgcgagcctggagccgggcgcggccctgctctgtccacagcccgcggtggctcccacctcccgctgggcctgcgcgacctgccccccggggcctcccagccctcactgccctcgcgggctgcactctcccccaacactccccagggctgttcggcctccccagcagctccccatgccctgcccgccgcgctggcgtctctcccagcccgctgcagtcccctcgttcacgtcagcttcccaagggcctggattttgttttgttcagtgcagggggacccagcacacagtaggtgctttataaatgcttgttgcatgaatgtccgcgttcggtgtcgcccccttacggcggccccccgcgcgcccagctcggcgcccagcaagccttgtgcgcgcaggtgatgtttgctgaatgactaatgaacctcagcgcgccaagccgggctgattcgggggtggttccgagcttccgcagggtgaccgtccgcgggcagcggaccacagccgcatggcgacgccgcctctggccccccgcgacccccattccccgtgggacctctcgtgcccccacccccacccggcctcctccccgccgcctcgggcccccccagcctcctccgcattcgaactccccagcgtggtcggacccggaccctggcgccgctcggcccacgcgagtcccctcccctctctcccatccttggatctcccaccgcccctccgcagcctcggtcccgcgagactccccagcccccgcgagcacccccagaccccacggtacgccctcgcccctttcgggaggagccccgccccgggcccgcggactgacccctcccgcccctctccgcgcaggcgcagggcggccccgttcgcgtcccgcacccccaccctggccgccgaggggcggggcgcggcgggtccggggcggccgcggctccatggggctcctggggctcctgagcctgctgcactcggccttcttcggggaccaggtagggcgcgtgggtcgagccgttggggagggctccgggccgcgcaggaacggggcggggtccacaccgcgggaacagcgggcgcggcggcggggggcgcatggggcgagcgcgcggaggctgcagagtcgggggtctagtgccgtcgccgtagagaccgttgccgggaaaccgcctcggaaggctggcggggatggaagcccctctcgtgcgccgctgcgacccccagccccgggtctgcgcaagcgcagggctcgcccagcccagccctcggcctctgcaggagaccctcggacccctcctcactgcgccgacgcggaggctgcgccagctggggcggcgggggcggctgcgggggcatcctgcggaggctcggccctgcgcagggtgggggcctgggccacgccctgcgcttctttgggcctcagtttccccttctgggcgcgagcgtatggcctgctttgacgttcgccgccgctgctgttcgtatccgtccgctcccgaccccagcgcttctccagcctccggaatcgtctgaatttcgcggctgtgacatccctcattggaggggaaactgaggctggggggtgcagcggggagcccaaggtcacgcttcgaggccggagcctcgttgcggagctaaggcgcccgcaagagaacgcggggcgggggccggggagctgtccgcggtgctgacggaggcgcacgtctgccgactcgccgccggggaaactgaggcccatagcggcggtcaggcttcagggcgcggcctggaccggcctaccccaccctcccccacctccggtggcctcctcaccggtcagggctctgcccggccacccagccggcggcgggccgtctctatcctcccgcgatgacctggtgccttctctgtccccacccagctcccgatgggggccgcccctgtttctgcctctagcccctggcacagaggaggcatcaagggggcggggacagctcgaggtcagactcagaaggctcaaagacactccaagagtgagccgtgtgccaggctgcggacttgcggggaggtgtcacaggacaggggtgggggagtgagcatttcatggaacttcccctttagcccagcagcagtagggggcgtggaggaccccagggaggagcctaggtcggggtcttgggctaggccctgcgttctgcagtgggagaagggggagacctctctcagtctcctgaagtcctagggggctgtggggggttcttgaggctctgaaatgtctggtgatgtctgagtgtggctgtggttcaaggatttacagggtcgaggattttagtgtgtggggggggattgttcagggacataatgttttgtagatttggggccaagggcatcttgtcttggggtctcagcccccatgtaccctcagccctccaggccctggccacccccagagggataagaagggaggttcagtgtcactccggaggcctggctggcacaggtgaactcaggcaacacgttccctggcccaggcctcagtttccccatgtatacaaggacaggactgaccttggatcccccaaacccctgcctgatgggggcctggggagctgagacatctgaaactacacagggaggtgggacttagttcctctttgggggaggcagggatcatccaacccacccttcagtaaacaagactggaaaccgaggccagagagagacatgcccagggggacacagggacaacaaggctgagctgaagccagggccctgggctctgcatccccaaccccatttcagcctcgcccagctctgccccggcttgacctgtcaaaccccaccacgcgccctaccccatggctccaccagacaccccctgtgtcccaagcatgcattgatcttccctcagcctggaacgcctctcctcctgatcactgctgttcacttctcagggcagccttccagcctccagaaaaaaatccccttcgaggcgggcggatcatgaggtcaggagtttgagaccagcccgaccaacacggtgaaaccccctctctattaaaaatacaaaaattagctggcaaggtggtacatgcctgtaatcccagttactgaggagtctgaggcaggagaatcacttgaacccaggaggcggaggttgcggtgagccgagatggcgccactgcactgcagcctgggggacagagcaagaccccatctaaaaaaaaaaaaaaaaaaaggccgggcgtggtggttcacgcctgtaatcccagcactttgggaggccgaggcgggtggatcacgaggtcaggagatcgagaccatcctggctaacgtgaaatcccgtctctactaaaaaatacaaaaaattagcctgggcgtggtggcgggcgcctgtagtcccagctactcgggaggctgaggcaggagaatggcgtgaacctgggaggcggagcttgcagtgagccgagaacgtgccactgcactccagcctgggctacagagcaagactccgtctcaaaaaaaaaaaaaagaaaaaaaagaaaaagaaaaaagaaaagatcccctgtgtctgcccactgcattgcctccccagacccaaccagtggggacagctgcgtccagctctgggggctcccagacagccaggccgaagggctctcagcccctggcagtgctggcccgggacaaggccctcgggtcttcagctcaaggcccaacaggaaacagcacgggtcctcccttgcctttgtctacggggccttgaatactcggaccttcccaccctctcctatcattccctgcaccagcccttgcagaatcttccgcctcctctccattttacagaggaggaaaccgagggttgagcggcgaatgatttgccctgcctgcccagcacggaaaaaaatcactcttctggccccagtcgcctccctttctgtgctgtgagtctgtgtccagagcaggaagggctgctccgagctgcagggacgggctctgtgtgttaaaccttcaaatggcttccagggactcatggagcatccaggacacctggagatggcgactcctgggacccctggcccttccctcctctggccttcggtccgtgagggtgaattaagtgtgccacccaccaggggcagagacacatggagacagagattgagagacagagaacagagggggagacagaaagagagagggacatgaagagcaacggagttacaggaggatctgacgctccgttggggagacagggagaaatgtggggagatgcagcgtcccaggtgctccccagtggccctgcccctcctcccctctcccctccccaccaggcaggaccctcagggagctccagcctggacccgaaccctgtcccaccctgacgcacctgcaccaggccaggctggacctgtggggtgggtgcaggcctggccccagcccggccactgccctggaaacccctcccccgccaagatgctgatgtaacatccaggatttgatgttttactctccaattctgcaaatccagacgcaggaggttttaagaggccgttgcaccctgcaataaagtgcgggacacaggaatcttggtcctcggggcacccccttccctcgggggggtttcgccccccgcactcacggcccctgagcccgcgcggaggcccgacgccccgcggccgacgccggtccccgccccgggccgccattggctgttgccatggcaccagcccgtcttcccgcgccctcattggctgtctcacccgcatccctcatcccgcatcctcccccgctcgcggtggtctcgcccagcgctaggagcggcagcgccgcctgcccaggcccggaccgggctttgtccgccccggagcccctgcccgcgccgcggagaccccggagcccgcgcgctccgaggccaccccgggccgggatttccggtggggcccgcggagccgcgcagagggaggaggccccagacccaggcgccccgccagcccagctgcacgtaagcgggtgtgtgtcctcggggaggagggcaggggcgcgacctccgcctcgcgtcgaggtttccatccctggctctcagcattgcccgtcagcacagactctggaccctccatttccccagagtgggagctggaggggaaactgagtcccggtgagctgggcgtcagcgtttctgcagccggtcctgcgcacacacccactcacgggcttcaccatccggacctccctgaggtgatcggaggaagggatgggcaggccagtggtgtgtcttcgggggtgttgctgcacctctctgggtgtcagtttccctctctggaaagagggggtttggattaaaggaaggagaaaggcccctttgggcctggcttcccatacctgtgcctccctcccctgaaatgcagcccgctcaataagaccagcccccagtcatggtgccttcagggagtgatcgctcaggaaggcccccaggaggctacacgatgcaacctgggggtgaaagtaggcagaagagcttcgtggaagaagctgcactgtgtgggatggcaggacttagaaaaggtgctctaggcagggcaactgcacgtgcaaaggcctgagagaagagagcctccagcctctaagtgagtcgcggtgtacatggaggagtcggagcgtatcctgagggcactggggagccatggaaggtgtttgagcatgggagaaatgggatctcacttgtgacgtttaaagctccctctggctgtgcatgggggactgtgggaggccaggaagaggctgatcagaatgtcctcacagaggggtgtcaggagctgggggaggcatgatcccgctgggcagagcttggagggactagcttagtctgatgaggatgcagaaatgaccaccgaatgtggggagagggaaggtgtctgaggcttggcttcggtcagctgagaagaaccacgtgggggaggcctgggtttggggagcaggaggcagacatgtgttgctttgcacgtcatctggtccttccacctggctgggcatgggatggtgacctcagctggaacatggggctcgagccagaccccagggtctccctgcgtgtagcccccaaccccaagcctgatccccactggagacctgaacagccttggacatcatcggatcagggtgggaggtgccagcctctgccacctgacttccagtccctgtgcccctcccaccctgcccttgggcactcctgccctgcaggttcctcagaggggcaacccaaagccagagaggggcgggtcttgtcgggcctccagcctggacttcccagcccctctggggcagcatctgggtgccagacctcggttcctagggcctcgtttctccctctgggaacagccaaatggtggtccctgagactcaggacagaccaagaaggagccggatgacatggcaagccacacactgcgtcccctgagcaggacgggacagcccgactccatcctcccacctgcgactgagcccccacccctactcctgtcccagccgtgcccctggtgacatttgggtgggaggggaggggatgagggggcacctgggggtcagagaacaaatgacgggtgaatacatgtgtgtggccaggtggaggagggaggggaggagcaggtgggctggacagggccggtgtgaggaaggggctcaggctggcagggggaggtggcagagggatgggctgccattggtgcgtctgagacaaaggcggagggaggaggcgagcgctgatgggaaaggaacaaagagggaaggggggcgtgaaggggggctccggcgggagggccgagccgagggaggaggcgccggccagctggacagagggaggaggccaggccagagccagaagacggccagaggcacaaagaagccagcgcgctggcagagtcaagggatggggcaggggctgccggggccagcagggaccagctgaaggctgcgcagggggtgcgggccacacaggtagccaccctgagctcagccaccgatggagggtcgtggggctgctgcggtgatggcggtgggcttgggtccatctgtcctgccgtttctgcacagcttaggtgtcacccactggccttcgtggtgttttcattgtccatcggcagggacagctggtggtctgtccgccccgcgtgtctggctgtcagcctctgggcaggcttgcttttatgggggagggtcctgtctgtctgtctgtcgccctctctggctgtgagcctgggggtgctgggctggccagtcggcttgctgggttaggctgtcccagctgtctgtgtgtttgtccggctgtcaggatgtgtcctgggggctgggaaggagaggccgacccatcgtctgtcggtcgactggtcagttggacgttcagctgtctgtacgtctgtctgctggcccctctgtctccccttggggccacctctcactccacctgcccctctgcgccccggattgcctggccaccaccacgtgggcctgtacttgtccacaccagtgactcctgcctgagaccccccccaacccaggatcaggcaggacggctggggcttaggtcaggggccgtctgtccggaaggcatcaccgcgccctccccagaccatcagctgaaccctctgaccctgtgatcccagacgctgcaggagctgaagatggcgagctccgtggcgccctacgagcagctggtgaggcaggtggaggccttgaaggctgagaacagccacctgaggcaggagctaagggacaactccagccacctgtccaagctggagacagagacgtcgggcatgaaggtgggggcctacatggaggaggtgggctagggtcccggggtggtgccccccggcagcccagtgcagtggctgatggcttcccgccctctttcccgcccctgcaggaggtcctgaagcacctacagggaaaactggagcaggaggcccgagtgctggtgtcctcggggcagacggaggtgctggagcagctgaagggtgagcggtggggccacccgcagagggagtgggggaggctggggggaaaggcaggcagggccgctgacctccgccctgtccccgcccatccagccctacagatggacatcaccagcctgtacaacctcaagttccagccgcccaccctgggcccggagcctgccgcccggacccccgagggcagcccagtacacggctccgggccctccaaggacagctttggggagctgagccgggccaccatccggctgctggaggaactggaccgggaacggtgagtgggcgtgggaacccagcctcgggcagctggagcatgactcggtccccagcgggctctgccctctaattcgcccacccgcatatgtctctgcccacacctcacacgccccacccacttgcatatggcactgcccaccgaacaaccccgcccacctcggagcttcgtccccacgtggcctccctccccctccccagcccggctgacctctgctggagttcagagaggatgggggacgttcctggctgagggaaaggctccttggagacgtccccaggggtccgagacacgcaggcgtcgccagggaccgggctgtgtccggtgccagggctcagccaggcctggagccaggcgggctcaaagccgtctttgtagagagctgtggcccaagaagcgtgggctcagggccagcagagggaggcagggtctgggcaccctgtgcagctgggaggggtcatgtggggtcagatggggccattgaagagcagcgtggggttgtctgtgctctgctgtgggacctcactcagctcccctaaaccctcccagcctaagactcctgccctgtaaaatcggaatggccgtgtctcccatgaggttaagggaaacctctgttgcacctggagcactttgagcctgaagctaccttgtaagctggagggaggttagcaagtatgggagaagtgttagaggcaggacagcctccctcagtctttcttcaaggaggagaatttccaaaggaattgctttctcttttttttttttttgtttagtacatatagtttgaaacagggtctcactctgtcacccaggctggagtgcagtggtatgatcatcgctcactgcagcctcgaactcctgggttcaggtgattctcccacctcagcctcccatgtcagggagtagctgagaccacaggtgcgcaccatcatgcctggctaatcttttgtacttttttttttttttttttgagacggagtctcgctctgtcgcccaagctggagtgcagtggcgcgatctcggctcactgcaagctccgcctcccgggttcacaccattctcccacctcagcctcccgagtagctgggactacaggcacccgccaccacgcccggctaattttgttttcgtattgttagcagagacggggtttcaccgtgttagccaggatggtctcgatctcctgacctcgtgatccgcctgcctcagcctctcaaagtgctgggattacaggcgtgagccaccgcgcccggccggctatttttatattttttatttttattttttcctttttagagagggggtctcgctatgttgcccagactgttttctctcctttaatttttttgcatcccccagttaatttcaatacccacccccccccccttaccctagctcggggagtgccacgggagagaccttgccatgttgcctgttaaccttggcatacagtaagcgctaacaagtgattacaaatatcaaaataaacacacacggcgccgccctctgagcccgcccccgctgacttgctccccaggtgtttcctgctgaatgagattgagaaggaggagaaggagaagctctggtactactctcagctgcagggcctgtccaagcgcctggacgagctgccgcacgtggagacggtgagccggccggggagccagggggcagcgcgcccgccccactcagggtgcgggaagcggcgtgggggaggaacggggcctggcccgggcgcccctcaccgtggcccgcccgcctgcctttgccagcagttctcgatgcagatggacctgatccggcagcagcttgagttcgaggcccagcacatccgctcgctgatggaggagcgcttcggcacctcggacgagatggtgcagcgggcacaggtgcggcggtgggcggggtggcgcggcggtaggcggggccctgcgccagtgggcaaatcagagtgcagatattatgggcggggtctggggtaatgggaggagtcttatgcctcctgggttggggggcgcgggttctggttcaggaggcggggccagaagctggaggtgttggtgggtggagtcaggaggctcagagcctgagcacaagggcggtggggtgcgacagtggaaggtggcatggcctgtgggcagggccagatcagcaggtgggtggggcctagaaggacgaggtctaggttctgggtggagcccaaatgggaagtgggaggagtcagagcctgggatggactaaaggcggggtttagacagtgggtggggtcatatcttaggaggcggggcttagggagctggcagggctggatcagggagaaggcagaggtagggtcagggcctggggcggggttatcaggaagaggcggggtcagagcccagggtggggtcatcccagggagaggcggggtcagagccgggggcggggtcagctccagcacttgccctcgtgtggtcctgagcagatccgcgcctcgcgcctggagcagattgacaaggagctgctggaggcgcaggaccgagtgcagcagacggagccccaggtaccgggtggggcagagccagggaccaggggtggtgtcggcccaggcagaacggggctcctcgagttctgcccgcccccgcccacatcatcacgggtgagcagactgggtgctctgggactgtacccccgaccctggtgctctccctgcaggccttgctggcggtgaagtcggtgccggtggacgaggaccccgagacagaggtccccacacaccctgaggatggcacccctcagccgggcaacagcaaggtgagggggagggtgaaacgggggctggcgcagctgtctgggctggaagggggatcaggtctgcatcctcgccagtggtggtgccctcccatgcctccatccagcaccccctcgggtgtaggaaggcccctctggcgtgcagctcatgcagaagctgcgggcctggcgaggtggatggggaaatacgtcccgtagcgggggctaagtggggcaccatagacgtccccgtggagtcccttggctctgcgcggccaccctaggaatgccaggtgaggggggccagcctccccgaagcacgtgtgcagcctcctagcgtcccctcatctgtcccccaggtgggcgtggggctgcccttggggacggggcaggggtcacagggctccgaccgggtttccaggtgtgcggggggcaggtgagggaccccaccctgaccctgccctccccccaggtggaggtggtcttctggctgttgtccatgttggcgacgcgcgaccaggaggatacagcgcgcacgctgctggccatgtccagctcgcccgagagctgcgtggccatgcgccgctcgggctgtctgcctctgctgctgcaaatcctccacggcaccgaggccgcggccgggggtcgcgccggggccccaggggcaccgggcgccaaggacgcacgcatgcgcgccaacgcggcgctgcacaacatcgtcttctcgcagccggaccagggcctggcgcgcaaggagatgcgcgtcctgcacgtgctggagcagatccgggcctactgcgagacctgctgggactggctgcaggcccgagacggcgggcccgagggaggtggcgccggcagcggtgagtgcctggcctggtgggccccctccgcgcaattaacgtgcagctagggcttcccgggggatgggcgactaggacctccagcctttgctgcctgccttctggcgttggaggctgcagtaccaggctccggccgaggcctgtgggggcatttgacgttgggaaaagacccgcccatgatcgtacctggcgcagagtaaacgctcgggaagtcgctgaatgcatggatggatcgtgggtaactctggaaagttgggtgcagactttgagattctttttttgcagttgatcgcaaagttaatatgggggccgggcgctgtgactcacacctgtgatcccagcactttggaaggcagaagcaggagaattgcttgagcccaggaatttggggctgcagtgagctgagatcatgctactgcactccagtctggacaacagagcgagaccctgtctcgtcagttttatttttaaaaagggcagaagcacagctgaaaggtgtggtgctccaggaactacctcgcctcccttcccaaggctgagtgagagaggccaccccatcatcccatcttagagaggctgggaaaggaagtcccaactttgcagccatttgcaaagctcccgggatccttcaggcctggggcgggcgggttgcgggaccttcgggagtcacctgggacatttcctgggaatgggggctctgatctggtccctgtgcccacagccccgatccccatcgagccgcagatctgccaggccacctgtgctgttatgaagctgtcctttgatgaggagtaccgccgtgccatgaacgagctaggtgagtgtcccaggtcctctgggaagccatcctccagcccccgaacaggtggtggctcctcggccgctaaagggacacaggctgggtcatctgagcttgggctggggattggagcccggagagggacagactccctggagtcacatagcacctctcatgagtggaccgtcaccctgggccctctgtccccatgagctgcgtgtggcctcccgatctggtctgaggcttcgggggtgactttcagccctaagttccctggggctcagaacagggaacggaccagaagggcaaagatagatagaagacaggcccagaattggaactgtagggggtgttttacgtttgaggacattgcaacatcttctctttgtcaatataaaaagtaattgaggccgggcgaggctgctcatacctgtaatcccagcagtttgggaggccaaggcaggaggatgactttagctcagaagttcgagaccaggctgggcaaaaatagtgagaccccatcactacaaaaaaaaaattagtcccagctactggggaggctgaggtgggaggatctcttgagcccaggaggttaaaggtgcaaggagctatgatcatgccaccacactccagactgggcaacagagccagaccctgtctcaaaaagaaaagtcttgctgtaacttttttttgagacagagtctcactctgttgcccaggctggagtgcagtggtacaatctcagctcactgcaaactccacctccgagtagctgggattacaggtgcccgcccccacacctgactaatttttgtatttttagtagagacggggtttcaccgtgttgctcaggctggtctcaaactcctggcctcgggtgatccgcccacctcggcctcccaaagtgccgggattacaggcgcgagccaccacgcccggccactttacatcttcaaactctgtcccggtgaaacatttcctgctcatcctgtccccagcccctggcacccacccccatcctactttctgtctctgtgaatctgatggagctagggacatcctaggagtggaatcacacaggatttgtcattttatgcctggcgtctcccactgagcgtgacatcctcaaggtgcacctacgccatagtctgtttgtttcagagcctcattccttttgagacagacagggtcttgctctgttgcccatgctggagtgcagtggcgccatctcggctcactgcaacctctgcctcccgggtttaagcgattctcctgcctcagcctcccaaagtgctggagttgcaggcagaaggagccaccacacccggccaaagcctggctcccttctgaggctgcgtgacatcccatcgtgtgcacagggcacgctgggctgacccacttgtcctcctatggatgctctagctgccccccactcctggctctgtgaatcgtgctgtggtgaacctggatgtacgcgtttcaggctggaagttttctgagatatgtccctaactcacttccccaaagggtgtctccactgacccactcctgctctgagaacagtcacatttgcctctgttgtctttgaagagggagaaaagtgttttggtgacaagtcctcctctccctctgactcacaggcgccatctccccgttgatttcccccttttgtaatggggaagcggggcgagtgaagagggtgggtgtggccgtcacccatccctacagccctgtctgtgctggggatgctgctctccatctgatggtcttggggtgtattattagaggactcagggggccttccccgaggcacctatcaaacagggcagggaagaacattccaggctgagggaacaacaggtgcagaggcccagtggctggaggaagcgtgagccaggaccgagggctgacaggaggcgggggtggcagtcacagggcactgggggtacccctgtgggtctggcagcagggtgaggccataccggctcctggaggaggtctcagacttgggcctggaaggggaacttgagggcaggtctggggcatagggagggcctctgggcaagggagtgaggtggggcgctgggcagcaggcagggtcatccctgccacccaccaaccttgttgggtcctcacaggtgggctgcaggccgtggcagagctgctgcaggttgactatgagatgcacaagatgacccgggacccgctgaacctggcgctgcgccgctacgcgggcatgaccctcaccaacctcacctttggggacgttgccaacaaggtgcccgggggcagtgggtgggctggcactttcctcatccagtcttccagggactgagcctccttccaactcatcccagcctcgaaacagccctgagagctggggccacttgtccccaacttacagacgggtagactgaggcccagagagtgcggtgtggggggacgggagcgcgtgctgaacctccccacctggcggtgtcctcacgcccaccctgttgctgcctctgcagaaaatggccctcattgtagagggggcctcagggccccgaggctgggtgtctgcccctgtctgggcctcagtttcccgacctgagcatggggtaaccgtccccggtagtggtcaggatcagcaggggtctgagtttgcagctgcagcacacagacggggctgggaggtgaggggcacagtctcccttgtgtcccaaccccgtgaccccggctgcataacccccaacaggccaccctgtgtgcgcgccgcggctgcatggaggccatcgtggcccagctggcctccgacagtgaggagctccaccaggtacagggcggggtgctgggaaagccttccagggtgtccctgataggcagaggcccctccccagcggtgtggtgggctggcaggggtgtcccgtccgactctctgcagactcacatttgctggggggtttggggggcctggaccctagtcccaccacacttgcccctcaccccacccaggtggtgtccagcatccttcggaacttgtcctggagggccgacatcaacagcaagaaggtgctgagggaggcgggcagcgtgactgccctggtgcagtgtgtcctgcgggccaccaaggtgggcacccggtgggcggcagggatgcttcttcagtcactggaaggagactgctggcggcagcgggcgagctctccgacttgggaggaaatcaagttgaacagctcactgcttagcgggtggtccagcctcagaccggctggggctcactcctcatgtcactgctctttgaaagcaaatgtgggctgggcgccgtggctcacttgaggtcaggagttcgagaccagcctggccaacatggtcagaccccatctctactaaaaaaaacagccaggcgtggcagcgggcgcctgttagtccagctactcgggaggctgaggcaggagaatcacttgaacctaggaggcggaggttgcgccactgcattccagcctgggccacagagcaagactgcgtctcaaaaaaacaacctcactgggccgggcgcggtggctcttgcctgtaatcccagcactttgggaggccgaggcgggcggatcacaaggtcaggagatcgagaccatcctggctaacacggtgaaaccccgtctctactaaaaatacaaaaaattagccgggcgtggtggcgggtgtctgtagtcccagctactccggaggctgaggcaggagaatcgcttgaactggggagtcggagcctgcagtgagtcgagatctcgccactgcactccagcctgggggagagagtgagattccgtctcaaaaaaaaaaaacaaaaaacaaaaaaacccaacttcactgaatgtgagcgtgggagcctttcctccgggccactcaggccctgacccgcccctctcccgcccctcgtccaggagtccaccctgaagagcgtgctgagcgccctgtggaatctgtctgcacacagcacagagaacaaggcggccatctgccaggtggatggcgccctgggcttcctggtgagcaccctgacctacaagtgtcagagcaactcgctggccatcatcgagagcggcggcggcatcctccgcaatgtgtccagcctcgtcgccacccgtgaggactacaggtcggcccccacccccccacccgcacacaggcagctgcgctcggggcgggcacagggctgggctgggcactgtcctcccgtgaatgcatgctcccaaggcttccccaggggctgctgtttgcagcataaatacgtcccaaatactgcgtgagatatactaaaatgcagacctatttattacattaaaattacttcaggccaggtgcagtggctcatgcctgtaatcccagcactttgggaggccgaggcaggcagatcacctgaggttgggagttcaagaccagcctgaccaacatggagaaagcctgtccctactaaaaatataaaattagccaggtgtggtggcgggcacctgtaatcccagctactcgggaggctgaggcagaagaatcgtttgaacccaggaggcagaggttgcggtgagctgagattgtgccactgcactccagtctgggcaacaagagcgaaacttcatctcaaaaaaaaaaaaaaaaaaaaaaaaaattcaggcagccaggcgcagtggctcacacctgtaatcccagcactttgggaggccgaggcgggcggatcacgaggtcaggagatcgagaccatcctgcctaacacggtgaaacccccatctctactaaaaatacaaaaaattagctgggcatggtggtgggtgcctgtagtcccagctactcaggaggctgagacaggagaatggcatgaacccgggaggcggagcttgcagtgagctgagattgtgccactgcactccagattgggcgacagagcaagattccgtcttaaaaaaaaaaaaaaattacttcaggctgggctcggtccctcacacctggaatcccagcactttgggaggccgaggtgggcggatcacctgaggttgggagttcaagatcagcctgaccaacatggagaaaccctgtctctactaaaaaatataaaattagccaggtgtgggccgggcgtggtggctcacacctgtaatcccactttgggaggccgagatgggcaggtcacaaagtcaggagatccagaccatcctggctaacatggtgaaccccgtctctactgcaaatacaaaaaaaatagccaggcatggtggcgggcacctgtggtcccagctactcgggagactgaagcaggaaaatggcgtgaacccgggaggcggaggctgcagtgaggtgagatcacaccactgcattccagcctgggcgacagaggggactctgtctcaaaaaaaaaaaaaaaaattaaccaggtgtggtggctcatgcctgtaattccagctactcgggaggctgaggcaggagaattgcttgagtctgggaggcggaggttgcagtgtgccaggataaggccattgcacaccagcctgggcaacaagagcaaaactgtctcaaaaaaaaaaaaaaaagaaaaattagcttggcttggcgtccacatgtagttccagctacttaggaggctgaggtggaagaatcacttgacaataggaggttgaggctgcagtgacctgtgatcacgctactgcactccagcctgggtgatgggagtgagaccctgtctcaattttattttaaatcatattaatataactgtcttcattaaaatatttaaacaatagagaatacttatttataaaaataaataatatttttaattgaagtacatctcaaatacacatcggatatactaaaaattaacttattggctgggcgcggtggctcacgcctgtaatcccagcactttgggaggccgaggtgggcggatcacctgaggtcaggagtttgagaccagcccagccaacatggtgaaactccgtctctaataaaaatacaaaaattagccagtggggtggtggacgcctgtaatcccagcactttggcaggccgaggtaggtggatcacctgaggtcaggagtttgagaccagcctagccaacatggtgaaactccgtctctactaaaaatataaaaattagccaggcggggtggtgggtgcctgtaatcccacctacttgggaggctaaggcaggagactcgcttgaacccaggaggtggaggttgcagtgagcggagatcatgccactgcactccagcctgggtaacaagagtgaaactccatctcagaaaaaaaaaaattattaaaataaaaatgttgttaaataagaaatattaaaataaaaatatttacatgttatttatgaaaacacaaaatattatttttacctggtcatcgtggctcacgcctgtaatcccagccctttgggaggctgaggcggttagattgcttgagcccaggagttggaggctgcagtgagccatgattgcaccactgcactccaggctgtacgacagagcgaaactttctctcagaaaagatagatatagacagaatctatctaagtataccccagataccacataggatatgtgcatgctgttttttcctttttttttttttttttttgagatggattcttggtctcttgccaggctggagtgcagtggcgcgatctcggctcactgcagcctctacctcccgggttcaagcagtgctcgtgcctcggcctcccgggtggctgggattacaggtgctcgccaccacacccagctaatttttgtatttttaagagagagagggtttcaccatgttggccaggatggtctcgatctcctgacctcaggggatccaccccacttggcctaccaaagtactgggattacaggtgtgatccactgcacccggcctaccttttttttttttttaactccatctcaaaaaaataaaaataaaataatttagtctctgtcatgcaatctttgggatatacttataccaaaaattagtctttccaagatccaaacctaaccagatgcgtttacttttacctgccacatctggcccccccatccttcggtgggcaggggagggtggggggtggcccaggctaacccgccctgtgcctacaggcaggtgctccgggatcacaactgtctgcagacgctgctgcagcatctgacttcgcacagcctgaccatcgtgagcaacgcgtgcggcacgctctggaacctgtcggcccgcagcgcccgtgaccaggagctgctgtgggacctgggcgccgtgggcatgctgcgtaatctggtgcactccaagcacaagatgatcgccatgggcagcgccgccgccctgcgcaacctgctggcccatcggcccgccaagcaccaggcggccgccaccgccgtgtccccaggcagctgcgtgcccagcctgtacgtgcgcaagcagcgggcgctggaggccgagctggacgcacggcacctcgcgcaggcgctggagcacctggagaagcagggcccgccggcagccgaggccgccactaagaagccgctgccgcccctgcgacacctggacggcctggcccaagactatgcttccgattcgggctgctttgacgacgacgatgcaccgtcatccctggctgcggccgcggccaccggggagccagccagccctgccgcgctgtccctcttcctgggcagccccttcctgcaggggcaggcgctggctcgcaccccgcccacccgccgaggcggcaaggaggcagagaaggacaccagtggggaggcagccgtggcggccaaggccaaggccaagctggcgcttgcagtggcgcgcatcgaccagctggtggaggacatctccgccctgcacacctcgtccgacgatagcttcagcctcagctctggagacccgggacaggaggcgccacgggagggccgcgcccagtcctgctcgccatgccgcggcccggagggcgggcggcgagaggcaggaagccgggcgcacccgctgctgcggctcaaggcggcccacgccagcctctccaacgacagcctcaacagcggcagtgccagcgacgggtactgcccacgcgaacatatgctgccctgcccgctggccgcactggcttcgcgccgcgaggaccccaggtgtgggcagcctcggcccagccggcttgaccttgacctgcccggctgccaggccgagcccccggcccgcgaggccacctccgccgacgcccgcgtgcgcaccatcaagctgtcgcctacctatcagcacgtgccactgcttgagggtgcctcaagggcgggtgcagagcccctcgcggggcctggaatctctccaggggcccggaagcaggcctggctgccggcagaccacctgagcaaggttcccgagaagctggcggctgccccgctgtctgtggccagcaaggcactgcagaaactggcggcgcaagaggggccactctcgctgtcccgatgcagctccctttcctcgctgtcctcggccggccgcccaggccccagcgagggtggtgacctggatgacagtgactcctccctggaggggctggaggaggccggccccagcgaggctgagctggacagcacgtggcgggcgcccggggccacctcgctgcccgtagccattccggctccccggcgtaaccgaggccggggcctgggggtggaagacgccacgccgtccagctcgtcggagaactacgtgcaggagacaccgcttgtgctgagccgctgcagctctgtgagctcgctgggcagcttcgagagcccgtccatcgccagctccatccccagtgaaccttgcagcgggcagggcagcggcaccatcagccctagcgagctgcccgacagccccggacagaccatgcctcccagccggagcaagacgccaccgctggcgcccgcgccacagggtccccccgaggccacccagttcagcctgcagtgggagagctacgtgaagcgcttcctggacatcgccgactgccgggagcgctgccggctgccatctgagctggacgcaggcagcgtgcgctttaccgtggagaagccagacgagaacttctcgtgcgcctccagcctcagcgcgctggccttgcacgagcactacgtgcagcaggacgtggagctgcggctgctgccctcggcctgccccgagcgcggcgggggcgccgggggcgccggcctccactttgcagggcaccggcggcgggaggaggggccggcgcccacgggttctcgccctcgcggcgccgcggaccaggagctggaactgctgcgggagtgcctgggagccgccgtgcctgcccggctgcgcaaggtggcctccgcgctggtgccaggtcgccgcgcactccccgtgcccgtctacatgttggtgcccgccccggccccggcccaggaggacgactcctgcactgactccgcggagggcacgccggtcaacttctctagcgccgcctcgctcagcgacgagacgctgcagggaccccccagggaccagcccgggggaccagcgggcaggcaaagacccaccggccgccccacctctgccagacaggccatggggcaccggcacaaggcgggaggcgccggccgcagcgcggagcagtctcggggcgcgggcaagaacagagcagggctggagctgcccctgggccggcccccgagcgcccccgcagacaaggacggctcaaagcccggccggacccgcggggacggggcgctccagtcgctgtgcctcacgacgcccactgaggaggccgtgtactgcttctacggcaacgactcggacgaggagcccccggcggccgcgcccacgccaacccaccggcgcacatcggccatccctcgcgcttttacgcgggagcgtccgcagggccggaaggaggcccctgccccgtccaaggctgcaccagctgccccgccgcccgcccggacccagcccagcctcattgctgacgagaccccgccctgctactccctgagctcctccgccagctccctcagcgagcccgagccctcggagccgccggccgtccatccacgaggccgggagcccgcggtcaccaaggacccgggcccaggaggcggacgcgacagctcgcccagcccgcgggccgcggaggagcttctgcagcggtgcatcagctcggccctgcccaggcgccggccccccgtgtctggcctgcggcgccgcaagccccgagccacccggctggatgagcggcccgcagaggggtcccgggaacgcggcgaggaggcagcgggctcggaccgggcctccgacctggatagcgtggagtggcgcgccatccaggagggcgccaattcaattgtcacgtggctgcaccaggcagcagctgccacgcgggaggcctcgtccgagtccgactccatcctgtccttcgtatccgggctgtcagtgggatccaccctacagccccccaagcacaggaagggacgacaggcggagggagaaatgggcagtgcccggcggccagagaaaaggggcgcagcctcagtcaagaccagcgggagcccccgttcccctgcaggccccgagaagccacgtggcacacagaagaccacgcccggggtgccagctgtgctccggggacgaacagtgatctacgtccccagcccggcaccccgtgcccagcccaaagggacccccggcccccgcgccacaccgcggaaggtggcgcccccttgcctggcacagcccgcggctccagccaaagtcccgagccccgggcagcagcggtcgcggagcctacaccggcctgccaagacctcggagctggcgacgctgagccagccccccagaagcgccacaccgcccgcccgcctcgccaagaccccctcctccagctcctcccagacctcgcccgcctcccagcccctgcccagaaagcgccccccggtcacccaggctgctggggccctgcccggccccggagcctccccggtgcccaaaacgccggcgcgcacccttctggcgaagcagcacaagacgcagagatcgcccgtgcggatcccgttcatgcagaggccggcccggcgtgggccgccaccgctggctcgggcagtcccggagccgggccccaggggccgggcggggaccgaggcgggcccgggggcgcgcgggggccgcctgggcctggtgcgtgtggcctcagccctctccagcggcagcgagtcctccgaccgctcgggcttccggcgacagctaaccttcatcaaggagtcgccgggcttgcggcgccgccgctccgagctgtcctcggccgagtccgcggcctctgccccccagggcgcctcgccccgccgcggccggcccgcgctgcccgccgtcttcctctgctcctcgcgctgcgaagagctccgagcggcaccccggcagggcccggccccggcccggcagcggccccccgcggcccgacccagccctggcgagcgccctgcccggcgcaccacctccgagagcccgtcccgcctgcctgtgcgcgcgcccgccgcccggccggagactgtcaagcgctacgcgtcgctgccgcacatcagcgtggcccgcaggcccgacggcgccgtccccgcggcccctgcctcagccgacgccgcgcgccgcagcagcgacggggagccccggccgctccccagggtggccgcgccgggcacgacctggcggcgcatccgagatgaggacgtgccccacatcctgcgcagcacgcttcccgccacggccctgccactgcggggctccacgcccgaggacgccccggccgggcccccgccgcgcaagaccagcgacgccgtggtccagaccgaggaggtcgccgcccccaagaccaactccagcacgtccccgagcctggagaccagggagccccccggggcccccgccggcggccagctctccctcctcggcagcgacgtggacggtcccagcctcgccaaggctcccatctccgcacccttcgtgcacgagggcctgggggtcgccgtggggggcttccccgccagccggcacggctcccccagccgctcggcccgagtaccccccttcaactatgtgcccagccccatggtggtcgcagccaccaccgactcggccgcggagaaagccccggccactgcctccgccaccctcctggaatagtggcctaggccggccttctggaacgttctctcccggccctgcggcgcggtctggctgccccatgggcctgcgctgtagacgtcccccataggtcgccccagggcctctgcccacccgagccccaccactctcagaacccccgcccagcgcacggcgacctcgcgcctcaccggaagaccttgcctctgtgccgcggaggtccaggaggaaacggggcggccgctaggcctcaagtcccgaccgtggagcgctggcaagggcgtcctggcccagccctgagcgcgcggcccttcccctgtcggaagccgttgcttgaccccgggcgagggaggcggtagcctccgggtccgggtctgggtctgggtccgctgcttcgcagggacagcgctggggaggtgacggcgcccgccgcaggtggggcgaggctgggggagggcggcgccgcggcgggcctgccagctgggggcctttgcggcgcgcaggggcgaagcctgtaatcactgcagccgccggtaattcgctaatgagggctttgcagggattgttttcattctcagccccagctgtgggagtgcgggtgggggtgtggccgagccccggcaggaagccccgcccagacggtgttcagggaacccggagcccaagcgctccggcggagcccaaaagggtgggggtgggaggggcagaggccaacggatccccctgcctgtcgcaccccttggcgggagacgggaaggcagcgggctgcgtacgatgggaccctggtgcagacgccgggccggctgacatttggaccccatcccagaggagatgctggctaccagctggggcgaccccaagggtcgctggagtcagtatcggcccggcgcagccgcggcgggcgaggccaatggaaaggagactgaggggagtcccggcagtgagcccgaggccctgggacctggagcccgcgctggcctctccccagcggagcctgcacgttacggagaccatcacatgtgggcgtggtcagtgcccaggaccgcaccgctgctcatcttgtcccttttcaattcccttctggttcatgatgcataaagcgctaggccctagaactccagaaacagcacagctggggcggggacccagccttgccctccacccgaggctctgggacaaggcgggaggttcgggggccttccggcaggtgaacgcagggctggagagtatttggtgccagatgaggtgaaagcttatagaagggcctgaggggctcggctgcctcatcccctggcgggggaggctgggagctgggcctcctgcgtggggtgggactcgcaggggccgggtctccgtgactggggcaacgcctcgtcctgcagagggagccgacgacctcttttctgcagaaaagctccagcaggcgctgccttcacccacggatctgcccaggctgaaggcacacgctcaatgccccacgtgccttctccaggaggaacgaagcagggtttgagggttgggtggatggagctcagaaggaaaccccagccccaccacggatgacaccatccctcccgtcccatccccagcatgggcaaggccagcctttctggcagaaggagctgtcctcaactcagggccgctgtgagcaaagctgaccccagcccccacccccagttaacactgctgcttctctgaatgcatgtcacgctgcaccccatgctccgggcccacaccctgcaggacaaggagctccagacaggacgtccataagtcaccgaggtgtgccacccagcaggtgctggaggtgcccaatgctccctcctaggacctcgcagccaggcaaggctgtcaggttgttttgggggaagagggggtcatggatggctgagcagagagcggggaaaatgcaggctgagtggggcgacctcctgcctgccaggagccccctttcaggacacagcgggggtctcacacttgctgtccccatccatggcccgagggggaacctggtggtctcttctgagcttttggacttggggatgccaaacacgtgctcaccctcacactcgccccggcccgctgcgcccctaattgccaaagggtagggaaatggcgaagccagccaccaggtcgctggtgacagggccagggttatgcaggaaggtggtgcggcattgccttccacatatgtaagtctctgggcggcgccctcccagctccctgcctctgtttccccatgtgggccgtggggaactcccagagctacctcttgggggagcgtggtggcagcgatgatggggagacgcctggaagctcacagaacttgggtctggctggctcctgcccgtgacgccttgcccagcagcaaggtgcgcaacatggctgccagccccgcctcccacccccaccccgagtcctgagctcactttcgccttctccatcccctgccgtgggggccacagccacacctcaccgcccagtccagctgtctccagaaggggacaggcagtccgcggtctctggacaatcaactcaaggtacgcccactgcaaggcctccctcccaccgcggcccctgcctggccacctggcctctctgcaccagggtgacaaggggtcctcgtctgccccccaatgctccagggccagtcctaaggagctgagggtctgaggacgcagggagggtggaggtgtcctgaggctgatggacagtgaccgccactggcccccaacatgaccacacgtgggtgctgaactcggggcgccgtgcccaccggcatggtcctcccgagctccgacagcattacctcacccggccccatctgttgccccggtccagccctgatggcgcgcgcctggtctgtctgattcccctagccgccaccccacgtttctgtaccgggtctctgcagtgttaaacggacgtgtaaatagtggtaaatagtgaaagcctgtccttccctaaatgtaaagccatctgtccggcgtaaggacgacaccgtcagctgtccgactcgcacacatttaataaactgagctcttgcattgcctgccgccatcacctcttcctcaaaatgggctgtgggcgggtaggttcatcgctgtctatgtgctgccacagaattgctgagaccccccaggttagatccctggaagcagagccagaaagcagaaactgggggcacagggtttgtgggcaccccacccagatgggccggggaggcactggctgaggccaggagtctccccctggtcccaagggagggcaggctccagggggtgcacagcaccccagacagggggtccaacctgggcattggtacctgggccagttattatggcaggccccagtgtggggcaggaggcacccatgagccactaggagctgtggctggtgcaacagctgggatggggcagccacagcagccactaccggggagagtcaatggtggacaggggctgcgggagctgggacggccccacgtcaaagccacttcagggagcacagccctggcccagctggggggacaaggaaagctatgactgcaagcagcacagaagtgcagggtgggaagggatggcaggagccggccccctccccaccttccaccctgggacactgccgggacctccctcggccaggtgagcagcttcagaagcatgaccagtgagaagtccctagggcccaggccgggctagccaagtcccagtttctggatgaggcgcctcccaggctgtgtgtggcaggccccctttcttcagggaataagaaacatcttccacattcaagaaacaaagctggctgtgggtctggagagagggtgaggcagccccaggtctctgggtcaggcggacggtccctgcatgcagtgcccggcaggactgagcagggttcccggggtcgccggtacccatccctccccagcttccggggccccgggacggagccgctcacagaggcaccattcagacggccagacacacacgaaagctttatgtgcagggcccagcctctgggccgccttgcccaggtttccactcaagttgctatttaggatgaaaagcctttggcaagaccctccgccgcactaacgccccctcccccagggccagaacccgcagggaagcaggcccaggacctgctgcagctggcagggtggctatgagactcaggacaccctgggctcctggccagtgactcacagcggtcctccagcaagggcagtggctgggagacacccgtgccgtggagctaggcccagcctggctgggtctcagggctgcttctcttgggtgaccccagcggcccagggtcgttgtgaagatcaacgtggcttgtgggaggagcccggggcccagaaggaagtggggtcaggggctcaggctggccctcgggctgctctgacattgggtgggcactcgctggatggaatcacagttaacacctcgatcccaacacctggactcagaagtggacaggcgagtgcctgccccgggagaggaaggaggtggcacctgctcccaggggccccactgcagagcacggccactgtgagctgacgacagaatcacagtacagcaataatgtccctatcctcttccagaaccccagtggggccctcaggtcacgcaggacggagccagctgggtgggtcccaccaactcggcatgaatgagacgacggatgaaccgcagccccagcatcaggaggggcgcctgtgtcaacacccacgtgggctgggaccccgtgaatgccagtctggggccgacggacccccagggaaagcctgggtgcaggccaccttgtgcgctgcccaagcctgcaggccccgagaggtcagcctgaggaggcagcctcggctgccggtaatgctgcctgcttcatctgggccacctcccgctccaggtcctcgccggctcgctgcaggagctcacacctctgcctcagcacgttgcccgcctgctgcagccgctggttggcagccacgtaggcccggctttgctggtagagctgctctcccggggcctccgcatcctccatcatcctgaagggaactggggggtctgagacaggacacagcagcatcactgcctgctgaccaccccatcctcctgggcacccctcactactgcccccaaagggcagggttccctgcagtccccgagtgagcttgccagccggggtcttcttaacatgacggatgcagccaggtgtggtggctcacgcctgtaatccagcactttgggaggccgaggcgggaggaacacttgagcccaagagttagagaccagcctggacaacatagtgacacccccatctctaccaaaaaatacaaatacaaaaattagctgggcgtggtagcacgcatctgtggtccctacttctctggaggcagaggcaggaggatcgcttgagactgggaggccgaggctgcaataagctatgatcgtgccacggtactccagcctgggtgacagaatgagaccctgtctcaaaaataaataaaaacaaaaatcaagtaatggaggcttcctcgtccatcagctgggagaggcacagtggctgggtggcaggaggggcttccagctctaggctacccgccttagcaaagcgtgtgaccagggggatcgggtcacagaaagagctcaagcctcgccagcagtggccctcctgggggcggggcttccattcctgcaaaagccgtggcacccaccgggatggactccactgagctggcctggctctcattcctgctgtctctggaagccagagacgcaacaagcccgccaccgaaaacctctccaggggccgtgcaacctcctggagcacacacttagggaggcaggggtggcgaaggtgagaggtgggcattgacgtcctggtgactcccacattcagcagaaactacgtatggctccctgctcccccacgtatgcaagcccagtgcagcagggctgaagcagcaccgacttcagggtcactcagagaagcgtcaggggcccctcggctctggcctgcccctcggcagtgtggtctcccacggacgaaggctccacgtgccgcacgggtctgggctgatcaaatcacctctgtcatcacctgctttagcaacagggtgggaaaggccgggcagtgcctggatgaaggcacaggaggccccctaccttctgtgagcgccccccgtcccccgcacagcgtgcctcagtttcgccacactcaacggccatggacctgagcccatgaagctcaaaccacggccccagcaccctcaggtgaccgaactgcatgctgggaataaaaccaactcatgcaccttgaccagtaccggcccacagaaccttccagatgatgcgcacacctcccaccgatgctggtccacaccagccaccagccatgtgtggctcctgggcacttgaaatatgtctaaagggaaaacacaactcaatttttctctttttttctttttcagagacagggtctcactctgtcactcaggctggagactccaactcctgggcgcaagcaaccctcctgcctcagcctcctgagtagctaagaccacaggtgcatgccaccacacccagctagtttgtgtatttttggtagatataggttttgctatgctgccaaggctggtcttgaactcctggcctcaagtcatcctcctgcctcagcctcccaaagtcctgggattacaggcatgagccactgcacctggccccagaattttctaatattactttttaaaaatgttcccttagaaattcacagtttctatcattccacatggctcattttcttttttcttttttttttttgtttgagatagagtcttgctctgtcacccaggctggagtacagtggcacgatctcagctcactgcaacctccgcctcctgggttcaagcaattctcctgcctcagcctcccaagtagcagggattacaggcatgcgccaccatgcccagctaatgtttttgtattctcagtagagacggggtttcaccatgttggccagggtggccttgaactcctgacctcaaatgatccgcccacctcagccacccaaagtgctgggattacaggtgtgagccaccgcacctggccgattcatcttcatttgtttcccgccagccccagaacagcctggggcagacattcttgtttcttttgttcacttgtccattagcagtgctctaagcgcagagcccagcacacaggaagtgctcaagaaaaggattgttgaatgaatgaatgagcctcatccagaacacaaaattcacccaactgcactgctgaatcctttggtctctgactagcttccacctcgtaaatcaggagtggacaagctttcctgccaaaggctggagtctctgctcccactactcaactctgcccttctggtgtgagagcagccactaaccgtatgtgaatcatttggctgtgtgccgtaaacctttacttaccaacactgaaatctgaatttcatacctctttcaggtgtcagaaatgttctttttcacccacccccatttaaaaatgtgaagtccattcatagctcccagaccttaaaaaaacagccaggggcagggtttggggggccctagcttaccacctctgttttactttatttatttctatttattaattattattataattattgaaacagagtctcactgtggtccaggctggagtgcagttgcgtgatctcagctcactgcaacctccgactcccaggttcaagtgattctcctgcctcagtctcctgagtggctgggattacaggcccatgccaccacacccggctaatttttgtatttttagtagagacaaggttccaccatgttggccaggctggtgtccaacctctgacctcaagtgatccacccacctcggcctcccaaagtgctgggattataggcgtgagccaccgcaccggccacttatttatttttgagacacagtctggctgtgttgcctaggctgtatcctcccactttagcctccaagaagctggggctacaagtgtccaccaccacacccagtaatttttttttttttttgagacagtctcgcactgtcacctgggctggagtgcagtggtgcgatctcggctcactgcaaactctgcatcccgggttcaagcgattctcctgcctcagcctcccgagtagctgagattacaggcgcctgccactatgcccagctaactctgttttgtttttgtttttgtttttgttttgttttttcatttttagcagagacggggtttcaccatgttggccaggctggtctcgaactcctgggctcaagcgatcctcccgcctcatcctccgaaagtgctgggcttacaggcctgaaccacagcgcccggcctccacccctgtcagaagaaccctctgaaaatcggtcccactctacggaggagtagagggagactcggagaggatacggaccgtgcccatgttgcgggggttcccagggcgtggggtcaggagttaggggtgtgcttctctcccgtccccttgctgccggggtctcaggtccgcttttccccgggaccgggctccccctaccttccggggccaggatggtgaacactggatcctctgccggcgcaccccgcacatcctccaggatctgctccaccgtggggggcgctgggcgggtgggcagcagcacgcgcttctttgccttggagcccatctctgaaggcggggaagggggcgctgaccggggcgtccacctctccgcccttgcccgggctgctcctcccgcccagcgaactcgtacgcacccgtcgcggtcccgctcccggggaagcccgccctgtcccgcccctctgagctcgccccaggccctgaccctccctccgcccaaaaacacggtggccaaggcttcagggtctggctcaacctctgcctcagtttccccgcggtcaccccagtcgccggcctcttcccacctgggcgcgggacccgaaagcccagcgtcgacgacgcagccacttccgattccggtcggagcaccgccccgtccccgaacacgtgacacacacttccggcctcctctcccgccggcccgccgctcatcgcggggctccgccccgtcttaaagggatagtgcccttgagactcggatctcagcctctcaggcgaacccgaacctggacgcgctacgatgagagcgagttcgagtccaggctccactggctgggtagaaaagcatccgaggctcgtctttctgaaaaggggaacacggcactaggggacacgccacccatgtggctgacgggagcacaaaattgctgtccacctaagggagcctggtggtgcatgagcactcggcggccggaacacagcgggggcggggcggtcgcggcgcctccacttccggccaaggcgggtcctcccacctcggggacggtgctggaggtcaccttttcctctccgctgatgcctgggaaggcagaaagagcagagggcccttttcctctctcaggggctttattgagatgcagtttacataccataaagttctcctgtttatttcgttttgttttgtttttttagagacagagtctcactgtgtcgcccaggccggagtgcagtggcgtgatctcagctcactgcaacctccgcctcccgagttcaagcaattctcctgcctcagcctcccgagtagctgggactacaggcgcccgccaccacgtccgtcaaaatttttttttgtattttagtagagatggggcttcactgtgttgcccaggctggtgtcaaactcctgagctcaggcaatccgcccgcctcagcctcccaaagtgctgggattacgggcgtgagccaccgcgcccggccaaattcgcctgtttaaactgtaaattcagcctgggcgcggtggctcatgcctgtaatcccagcactttgggaggccgaggcgggcagatcacttgaggccagtttgagaccagcctggccaacatggtgagaccccgtctctactaaaaatacaaaaattaggctgggtgtgttggctcacgcctgtaatcccagcgctttgggaggccgaggtgggtggatcacgaggtcaggagatcaagaccatcctggctaacatggtgaaaccctgtctctactaaaaatacaaaaagaaaaacaaaattaaccaggcatggtggcggttgcctgtagtcccagctactcaggaggctggggcaggagaatggcatgaacccgagaggcagagcttgcagtgagccgagatcgtgccactgcactccagcctgggcgacagagcaagactctgtctcaaaaaaaaaaatattgttgagagagaaggaaggaaggaagggacagagagagggaaaaggaaagaaagagaaagaaaggaaagaaggaaggagaagaaaaaggaaggaaggagagagagaaagaaaaaaaagaaaaaggaaataaagagaagaaagtaaagaagaaaagggagaaaagaaaggaaaggaaggaaagagaaggaagaacggaagaaaggaaggcgagagagaaagaaaaagaaaagaaagaggaagaaagaaaaaggaaagagaaagaaggaaagaaagaaagaaaaggaaaggaaggaaggggccaggtgcggtggctcaagcctgtaatcccagcactttgggaggccgaggtgggcgaatcacgaggtcaggagatcgagaccatcctggccaacatggtgaaacccatctctactaaaaaaggaaggaaagagaaggaagaaaggaaggaaagaaggaaggaagtaaagaaaaggaaggaagggagggagggaggaaagggccaggcacagtggctcacgcctgtaatcccagcactttgggaggccaaggagggaagattgcttgaggccagggttcaaggctgcagtgagctacaatcgcaccactgtactctagcctagtcaacgtagggagaccctgtctcaaaacaaacaagaaaaaaaacaaaggaatcaccgcaggagaggattctgggccatggtgagccatgttctggggctggacattactgctgacccccggccattccctgctgttcccactgcctggggtccctgggcctgggcggactctttctccgtggccggctgcattctccatggactgatgtccggggaccccaagcagaaaccacctgagccctggggcctcgggcccaccctgctccagaggaggccacagactgagcaccttctaagcaacctttatttgcaaactctgaggttggacgcggtgcccgaggcggacagtgtcacgtttctctccctccactttcccctggcttttggggtgctccagcctctccccccagcccactcccgcccaaacccaaaatgcagaggagacttctctctctctctctcccgccaggcttcggggttccacggggcccatccctggcaggccaggcgtcgggtgctggtgctcgctcctctggggccagcctggggaggcagcatggcagcagtgcctgtcagggacccaggcgggggcaaggtcgctttctgagctgacaacttcaggttccagctggcagccagacctggggtttggtgggggtggccctggcacgggagagccaggcgtatagtgggaggtccatggacatgccgcagaggacggggcctccgagggtcacggccaggaggctcagcaccatggccgaggctgggcagcggtggtggggacaggcggcagctctaagccgggggcggctgtcgggggtggtgggtcccatgcaggagccctgctgctggtccagcgtggaggatgggggacaggaggtgcagtccctcggggagccgccgcggcaggtgtagcaggaggcatggcagctggagcagaccctcagcgcgggcgccgccgtgtgcccaggcccagcggtcaccagccttgtgtggttgaagaaccgcggggggcagtaggccaggcagagctgtcccaggatgtaggcggggccgtcacacgctgctcggggacacgcacgcaaaggcccgtcagcttgccacccgcagcctgttactcgccacccgcccgcctggggccacatgcacgctgcccacggtggccgccaccgcctcccagcagtgggccctgccccgccggcactcaccctggcacagcccctctgtgtcccgctgcacacacgcgctgctggtcacctgggggcctgtaggccgcgctgtcatgtcctcggccgtcccatagagcagcagcgtgtagcggtacaacgtccctggacaggggtcgcgggtgggcacaggaggaaaaggaggctctcggcagcctggtcctggtagtccccgggctccctccccttcagctcccacgcggggccctggactggttcacatctctcagggaattgcacacctactgtgcgcctgtcactggacaccgacatctcccgggtgactgcacacctactgtgcgcctgtcactgggcacctacatctcccgtgttaccgcacacctactgtgtgcctgtcattgcacaccatctcccgggtgactgcacgcctactgtgtgcatgttctcttggagaaggccactgggaaccccttttgcagtgcggtcaccaaggctagctccagagcccctggggggaggttggagagccaagccccgcccaccacagccccgccccgccctcacccgtgttgaaatagtagcccttgttctctaggcccagggtccacacgccctgtgggttctcatcccagaagtgggtggacatgaagacccagttgttgtagccttcagtgctgacgtccaagggtctgggacagaagggtgggtgggggtgggggtgtcaagagggatggctttgtgaagccggcagagccccatgaagtgtctgaccgcacgcgctggtggccgcgtgtcctctgggtgtgggtgagggtgtgactcggggtcccaccaactaggctgccgtgtgactcctatgggcctggcccctccccgtgaggacactccgggtagatggcagcgtttaccgacagggcatgaggccgccccctctcctctgcgggccgctcaccgtatggccacgagtgtggagcgcgtgcccatggggctggtgagcgagatctccaggtctccgcgccggctgtaggacagcgtcagctgcgcctgcacgtgctccagcgagcggatggagttgtggaggccggcgcaggccgatacgttttccctgatgtagatcagcggcaggatggggctgagggggtcgaggggtgaggaccctcctgcggcctgctggggggtgggtgggcggccagcaggcgaggtcggggctcagaggtcacggggtccagccctcgttttacagatgggtaaactgaggcctcaggcctgtcccccacacccccagcggggatagcggaggggcgcgcaggggtctcacgtggggcggctctggacccggacggcgcacttcctctgcggctgggtgggcagccaggtgcgggcggtgtccaccagcagcccggcgtccagcagcccgtatccgtagtgatggctcactgcgcggaagggcagcagtcactcgccccgtgggccccgggtccccgcccccgcccggccccgccgcaccttggcgccccacgccgttggtcctccagtcctcggcctgcaggtgcgccggcttggacgcgcggaccaccaggtgctgcatgtctctccacgtcaggaacgggctgcggggggcgggggcgggggcgggtgagccgccgggccgcgcctgggggcgagggcggtggaccgggccccgcagtcacctacttggcctccagcgctagggcgatcatgccggccgccagtggggctgaggccgaggtgcccgtgtgctggtctgtgcacccgtgatgcaggtccgtggtgacctgagggcagaggggggtgggactcggggggccgtgcacagtgagaatacagcccttcttcaaaaagtaccaaggactgggcgggcgcagtggctcaggcctgtcatcccagcactttgggaggctgaggcgggcgtgttgtctgaggtcaggagttcaagaccagcctggtcaacatagtgaaaccccaactctacaaaaatacaaaaattagccaggcatggtggcgggcacctgtagttccagctactcgggaggctgacacaggagaatcacttgaacccgacaggcagaggttgcagtgagcggagatcacacccacgccactgcactccagcctgggcaacagagccagactctggattaaaaaaaaaaaagtactaacgactgaattcaaaaagtaccaagggctgggtgcggtggctcacacctgtaatcccagcactttgggaggccgaggtgggtggatcaccggaggtcaggagttcgagaccagcctggtcaacaccttgtctctactaaaaatacaaaaaaattacccgggtatggtggcggggcacctgtaatcccagctacttgggaggctgaggcaagacaatcacttgaacctaggaggcagaggttgcagtgagccaagatcacaccgttgcactccagcctgggcaacatggcaagactccatctcaaaaaaataaaaaaatagtaccaagaactgaagtcaaaaagtaccaaggactggccacacagtggctcacgcctgtagtcccaacactttgggaggctgaggcgggcagattgtttgagctcaggagtttgagaccagcttgtggcaacatggtgaaaccccgtctctacaggaaaaatacaagaattagctgggtgtggtagtgtgcacctgtaatcccagctactcaggaggctgaggcaggaggatcgcttgagcctgggaggtagaggttgcagtgagctaagattgcaccactgcactccaacctgggtgacagagtgagactctgtctcaaaaaaatttaaaaaaaaaggtaccaaggactccaaggactgagttcaagaagtaacaaggactatgctcaaaaagaactaagagcctggccaacatggtgaaaccccgtctctactgaaaatacaaaaaaattagccgggcatggtggcgtggcctgctattcccggcactttgggaggccgaggctggtggatcgcttgacctgaggagttggagaccagcctggccaacatggtgaaatgccatctctacaaaatatacaaaagaaattagcaggacatggtggcatgcttgtggtctcagctgctcaagaggctgaggcacaagaatcgcttgagcccggcaggcgtaggttgcagtgagctgagatcatgccacttcactctgttgcacccagcctgggtgacagagcgagactccatctcaaaagaaaaaagaaagtgctgggcactgtggctcacacctgtaatcccagcactttgggaggccgaggtgggcggatcacgaggtcaggagatcgagatcatcctggctaacatggtgaaaccctgtctctactgaaaatacaaaaaattagccgggcatggtggcgggcacctgtagtcccagctactcaggaggctgaggaaggagaatggtgtgaacccgggaggcggagcttgcagtgagctgagatcgcgccactgcactccagcctggacgacagagccagactccatcttcaaaaacaaacaaatgaaaagaaaccctgggctgaagtgattctcccactttggcctcccaaagtgagctgttgcgcccggctggatttgtttttgttttgttttgttttgttttgttttgagacagggtctcgctctgtggcctaaactggagtgcagtggtgcaatcttggctcactgcaacctccatctctggggttcaagcgattctcctgcctcagcctcctgagtagctgggattacaggcgcccgccaccatgcctggctaatttttttttgtatttttagtagagatggggttttgccatgttggctaggctggtcctgaactcttgacctcaggtgatccacccaccttggtctcccaaagtgctgggattacaggcgcgagccactgtgcttggcctggatttgggttattgattgattgattgattgatttttgagacggagtctcactctgtcgcccaggctggagtgcagtggcccgatctcggctcactgcaaaccctgcctcccgggttcatgccattctcctgcctcagcctcccgagtagctgggactacaggcgcccaccaccacgcccggctaattttttgtatttttagtagagacggggtttcactctgttagccaggatggtctcgatctcccgacctcgtgatccacccgcctcggcctcccaaagtgctgggattacaggcgtcagccaccgtgcctggccttttttttttgtagttttagtagagacagggtttcaccatgttagccaggatggtcttgatctcctgaccttgtgatctgcctgccttagcctcccaaagtgctgggattacaggtgtgagccaccgtgctcggcctggatttgcattttcaaagcagctttgggagggtgctaagtcacagtggtggggacaggaggaggccaggctgggatggcagggcctggggaggggaccctgttggggcggctgcactcacgatctgggggtcggtggccacgccgctgctgtaggtggtggtgagggtggaggcgcaggcttcgctgtaccagggcacgcggccctgctgggtggtgctgcccacggaaagcgtgtggatgctgttggtgtagccgtcgcagttgcagttgtcgtagtgcaggccgccgttgcccgaggcccagatgaagagcgtgcccagcccgccgcggccctgggaaaccaggaggggcggggagggggcgtcggcctggcctgccacccctgccctcctcgggctgccactcaccttggtcacaccacgccggaaggcctcgcgggtgaggatgccggggccgtccaccgtgcggccgtcgtcctcgggaccccagctggcgctgtaaatgtggatgtgctgcggctgcaggctcagcgactgggcctcgatgacatcggtgatggtaccgtccagcatccgtacgcctgcagagccagggcgggagggccgctgccaccggccctgcccttccccacaccccagcccgccccgcgccactccacaccactccccagccctacctgggccctctctctgctccctggagtgggaccattcgtattggctcagcaccccccaagccctggagtctggggccctagcaccacccagcagtgagagggtgggctcccgagtccttgggcccagctccccgccagagtcacccccttccctctctgtcccggaatggtgccgctgggggaccccgggtacctccgattcgggcgttgaaagcgacccccacaccacagaagccattgttggccatcgcggccacctccccagcacagcgggtcccgtgcctggtgccagggccaagaggggctcctgtcacggcctccatccccctgccgggtactggggcttcccccgtgtgctgtgggagccctgctcaccggttctctttgctgggggtgtagcggggctgggggtccgggtcgtagtcattgaagtcatagctggccagggggtcctgggggcaggtggggatatgagggggccgggaggcgtccctagggtggtgccagcctcggcacctggggcagccctcgcccacagccacccgcggtctcacgtagttggcccagaggtccgggtggtccttctcgatgccatcgtccagcacagagaccacgatgccctggcctgacagcccctgactccaggcctgcaggatgctcaggtctggttgggcctcgctgttctgcagggggaggcggggttgtgaccctgtgagggcctggagttgagggcgccagcggccccgtccccgtctacccaccctggctgcctgctcaccatgtaccactgcttggagaaccaggggtccgtgggcaccacgacagagcgtttcacccgccgctgcagcgtctgctgctggaaccactgcacctgcagagcagagggtgcatcaggcctgtcccctgctcgcccctggggcccctcgtggttcagggagtgaggcagccccgtgccctgggaccctgtgtttgtgggggttgctctccagggtccccatgtgcctggggctctgtctgcagtcggaaggggtcgaggcttttggaccacctgtccttgggcccacagacgcgtcgttgctgccgcgggtgactgcaggtccccgggtccccaccccactctctcccccatccctgttctagatccttctatctctctcctgcatcacttccttattttttttctttttttgagacagagtcttgttctgtcgcccaggctggggtgcagtggcgcaatcttggctcactgcaacctctgcctcctgggttcaagcgattctcctacctcagcctcccaagtagctgggactacaggcgcacaccaccatgcccggctaatttttgtacatttagtagagatggggtttcgccatgttgatcaggctggtctcgaactcctgagcttaagtgatctgcctgccttggcctcccgaagtgccgggattacaggcatgaaccaccacgccaggcctggcttctctcttgcaaaccacatcaggaactggccactgctctccctcccggtgctgtaagcaggcagctgtccagtcctgttcaaggcacttcctggcctccgagggcttcccaggctccatcccaacccctcagcttgacatcccaggcattttctagacagggcccagcccgatgggacccaggcccctttctgagcgcctggacactgcgtcctgagggccactgggtgactgtaagcctcctactttttttttttttttttttgagacggagtctcgctctgtcgcccaggctggagtgcaatggcgcgatctcggctcactgcaagctccgcctcccgggttcacaccattctcctgcctaagcctcctgaatagctgggactacaggcgcctgccaccatgcccggctaatttttttgtattttcagtagagacagggtttcaccgtgttcgctaggatctcgtctcgatttcctgaccttgtgatccgaccgcctccgcctcccaaagtgctgggattacaggcgtgagccaccgcgccgggccaagcctcctactctttggaacccattacggtgtcgtaaaatccccttccctccatcccatgacctagacggtggggaagtcacgccgtctgtccctccttaccagagcccctggggcccagaggagggagggggaggacaagaggtgcccactgtgtaccaggccctggcaggcgccatgatttccgtatctgggtcttcctgcctcctcttgctgtatagacttggggcccgggcgggtctgagccacagaaagcacacagctgttcataacaaccacgagaaccacagaagatggctggtggccccaggaggcagctgagaccccgggcagggggttggcctccaggccaggctcaccttggggtttttcttcaggtgcaggcggtggccccagtgcggggtcagggactgctggaccacgccccggtgccgcaggtgaaagtactgcccgtcagggaagatctggggatgtggggaagcggccgcaccgatgggacccggctcccctgctgaagcccccgagggccggtaacagcccccttctttgtccttccccagcaggtgctctctgggagtcccagaagctgagcttggctgaggcaggggtgggctgggactcttgatatttagaagaccttgtgggctccctcccccttgtcggggtctagggttgttcagtcccctccaagcccccacttcccgtctatcccggtcccacccaccggccccaggttgacgaagccgaatttgcgtgccaggcgctcgacctcccggttaccctgggacacctggacggcccagctgctgacatagatgggggctcggaccggggcccaccccacagcccgggggcggacaagggccagggccaagaccaggcgcagccacagcgcaatcggggcgggccgcatggaggcggggcgggagcggggcctgcgcaaatcccctccctcccgccaaaccgccgagtgggcccaggcgtccgacccgcccccggcgccatagcaacgcagaaggcttcgactcccagggggccttgcggctactcagccaggaggggcgcgaagatctaacagaagcgggagagggacgcacgcctgcccgtcttccgcagacccacaccctcgggagcctcagttttcccatttgtacaacgacaagactaacccagagaagcgggttcactgttgcgataacgcgtcctaccctttgtttgacctctcccactttccaacacacccctccttcgagaatcagcccggcctcctgtccggcctaatcagaatcattcttttgcgtaatcccgcctcctccgataagcctcgccccgttcccgcccctaccattccgccctgcctcctttgtgatcagccccgccctccactggtctcgccaatgaatcgcgtcccgtttctccaatcggctcggatgtttctttagcccctccccccggttccgcccccccacgcctctcctcgccctggctccacccttcagccaataatcccatcctctgacaccgcccttccaatcagctacgtctcgctccggcccggccaatcggtgccctgggccgccgcgccccgccctctcccggcggggtctgggcagcggcggccgtggcggagggctatgcggcgggggagacggggcaggcccctcctcctttgtccgccctgccctcccattggtcctagcggggggccgggggcggacaccggcgcggggccggagcatcgcggctcaggctgcgggaaagcggtgcgcgtgcagcggggtgggtgccctggtccgcgggcgagctcgagcagccaaccccgggcgcgtcggggccatggacggcctgaggcagcgcgtggagcacttcctggagcaaaggaacctggtcaccgaagtgctgggggcgctggaggccaagaccggggtggagaagcggtatctggctgcaggtgagccgtcggcgctagcccgtttcgccgacgggcacaccgaggccatgggcctgggggtcgcagaccggactccttccccggctacggggtccggtccggccggtggagcgcgcgaggtgactgggacctcgaggtccgcccgcagcccttcccttgcccgcgccctgcgaccctgctcccgggccacccctctctagcttccgcccctggccgccccccgacgcctccttccgggcgctgggtgcctgccatgccgaagtccggttcttccagttgcccagtggccccagaggggtcgggatgccagtgtcctgcgcgtttcgccgtcccccttcccccgtggaccccggcctggctgcaacagtagagatcttcccgtttttctgaggggaggctcctggcgggaaggggaacggaccgtcctgggggcctgcccaggacccttctcctttcctcctcctctcctgccctagctcaccttcccccagctcaatggcttagtgccaccgagcgtaaatgtttgttaagacggagttgggttgtctgacggctgtgatgtggggaggctggactggggcccacagagccggagatccaggcaccccgattgtgactccattacagttcttccgtgactttcacccttggtgacgctgcgcgccccttcccctttccaaatctctagcaagagcatgtagtaaacgctccttaaatgcctccctccccacctttaaaacttttttttgagaccgagtcttgctctgctgcccaggctggagtgcagtggtgtgatcttggctcactgcaacctccacctcctgggttcaagcgattctcctgcctcagtctaccaagtagctgggattacaggtacccaccaccatgcccggctaacttttgtatttttagccgttcaacatggtgaaacggggtttcaccatgttggccaggctggtcttgaactcctggcctcaggtgatctgcccacctcggcctcccaaactgctgggattacaggcatgagccaccttgcctggcctaaaactttttaaaattaacttttttaagagacagggtctcactatgttacccagactagtcttaaacttctgggctcaagcgatcctcctgcctcagcctcccaaagctctgggattacaggtggaagccactgcacccagcctttcttccgtttgtgtggtgctcccagccccactggctctgccttctcttccaggaagctccgcagaatgactcacaaggacttgctctgggcctggggtattctgggtagaggacagtgccacttttttgagcaccttctgcaggtggatcccaggagtccagttcccccccaattttcccaccatctgggggttcccatgccaggcagcgccagaacagtctgaagtctgtgcccacaccctggaggtccccaggtgcctggtcccatgtgcagcgcagcaggtggcatgggcatggcccggctgtgcctgcccccgggagcaggtccctgacctctgccctccctttccacatccctggggctagtgggcaggaatttaggtcgtagagcgcccaggaggcaggcagcagggaggggctgcctggggcaccgtgtcaccagagacgaaactgaggcacagggaggcaggggctgcctctgtgcctgttctgtctgaagcatacagtcctccaccctgcccacccccagtcccatctgctgctaatcttgggggctgggcctccctccacagttctgatgtccaaggtcatcctcccgtcgctgaagctgcaggaaaagggatttaggggagggacgccctgggagagtcattcctccccacgagccaggcccggggagagatggcagtccctcatccccatctcccacctcctttaaattgacaaatcccacacccctgggtaacatacgaagaaactcagaggggacagtgactgggaggccactcctgggaccagctgggggactcctcctacccctgaccttgggtgcttttggataaagactaaagcaggtgggaggggctggggggacttgggcctctgccctttggtccagaagtggcctctatctcactctgcagatagcagccccaggggaggaggaagaaggctgtccaagctctctggagcacataggttccctgtgtgaccttgggcaacacccacccacccccagttttggctgttgaataattcaggaaaagcacaaaacctggcacacaataggcgcttaataaatgcagctgtcgtagtcattcttttcagagccaggttcaggattggggctgagctggacacacacacacacacacacacacgtttttctctgaacaccctccttgctgggactgtgttatagttgcctgaaggcacttaataaatgtgcagaaaggctgatggcggtggctcacgcctgtaatcccagcagtttgggaggccaaggcgggcggatcacctgaggtcaggagtttgagaccagcctggccaacatggtgaaaccccgtctctactaaaaatacaaaaatcagctgggcatggtggtacgctcagctactcaggaggttgaggcaggagaatcacttgagcctgggaggcgagcttgtagtgacctgagattgcgccactgcactccagcctgggtgacagagcaagactccatctcgaaaataaatagaaataaacgtgcagaaaggcgttctctctgttaacttgtaaccataggaggcaggggccattactactcccacttaccaagggggaaactgaggctccatgcagccacagcctcactcagtgccggctggtgagtgcacacccgaccaaagggctctcctccacccaggggatcgagatgctggggtttgctgcctccaagacaggaggttctcaaagggggtagccctgccccccaccccgccccaggggacactgggtgatgtctggagatacctgtagtcgtcatgacttgggggctgatggcatggagtgggcagaggccagggacactgctcagcaccctgcagtgtccaggacagccacttccccctctccaccgaaaacaaccaagaatgacccggccctgaacatcagcagtgccaaggcagagaaaccctgcgctaagataacagatgaaacagttgcctttctcagctctagaatcaagtcttcatgacagcctggcctcccttgcaggtttctgccatcccttatattgaaacactggcctgttttcccagtgcctcccaaagggcctggaatgagatggctatcgttgcagattacacttttttttttttgagacggagcctcacccaggctggagtgcaacggcgcgatcttggctcactgcaagctccgcctcctgggtttacgccattctcctgcctcagcctccccagcagctgggactacaggcacacaccgccatgcctggctaatcttttgtatttttagtagagatggggtttcaccgtgttagccaggatggtctccatctcctgacctcgtgatccacctgcctcggcctcccaaagtgctggggttacaggtgtgagccaccgcgcccggctgcaaacacttcactgggcagctattccgcacccacccccactgcccagcgtcgagctcctgcctgcccttggggagctctcaaccccggtgggggacatggacacgttgaccagttacaggcacaaggctcagggcctagaggcacgatgggggatgtacaggcacatcaggggcagtggacatatcctggaggcggctcctgggaggaggtgacggttgcagtcttcgtcgactgaaaggcggcctgggtaccgtcgtgggggctcagcgggtccccagccctggcacaccaccgcctctctccggcaggagccgtcactctgctaagcctgtatctgctgttcggctacggagcgtctctgctgtgcaatctcatcggatttgtgtaccccgcatatgcctcgtgagtgcacggctggctgcccacgcggggggttctgggggctccctggcagcccctgaccctgctgcaccctccctgcagaatcaaagctatcgagagcccaagcaaggacgacgacactgtgtggctcacctactgggtggtgtacgccctgtttgggctggccgagttcttcagcgatctactcctgtcctggttccctttctactacgtgggcaaggtgggccctgccagggcgggcacagccgtggagcgcatggggcttggggattcctgggaggcgctggggccagaaagtccggaggataccaggagatgggggatgtgaggggaagactcagtcccttccctggggaaacgagccctgtccgggggctgatggtggagggcccaccctgaagggtgtctgatggtggagacccaagcctgctccaataggatgtccgatggtggagggctcaccctacaggatgtctgatggtggagggcccaccctgaagggtgtctgatggtggagacccaagcctgctcaaataggatgtctgatggtggagggctcacttaaagggtgtctgatggtggagacccaggcttattccaataatatgtctgatggcacagggcccacccctaaagtgtgtctgacggtggagacccaggcctgtcccagtaggacgtctgatggtggagggctcactctagagggtatctgatggcgaaaacccaggcccatcccaataggacgtctgatggtggcgggcccaccctaaagggtgtctgatggtggagacccagtgcctgtccaggatgggcatctggtggagtggtgcagcccctctccccaccaggggcacagagctgggtgggcccgcgtgtaactcctgccccgccctgcagtgcgccttcctgttgttctgcatggctcccaggccctggaacggggctctcatgctgtatcagcgcgtcgtgcgtccgctgttcctaaggcaccacggggccgtagacagaatcatgaacgacctcagcgggcgagccctggacgcggcggccggaataaccaggaacggtgggtgctcgcaggcgcctggctgcctcaggccatctcccgggtctggacctgtctctctccaccttgcctccctttctgactttggccgccccctctcactgtccgcctctctctctcacgcttccgggaaccagtcttgcaggtcctggcccgtagccgggcaggcatcaccccggtggctgtggccgggccctccactcccctggaagctgaccgtacgtaaccgctgtggggagataggagctgtgtgtgtgtgtgtgtgcgcgcgcgcgcgcgtgtgtttgagcgtatgtttgctgtgtgcacatgtattattgtgtgtgcatgttttgtcatgtgcaagagggtgcgtgtgcatgggctcaagtgtatgtttggtgtgtgagtgagcaagggagtgagcatgttttctcacgtgtgcatatgtgtgtgtgtgcccacgtgtgcatgtgagtatatgtgtgtgcgtgtgaccatgtgtgcacgtgtgagtgcgtgcgtgtgcatgactgcacatgcgtgtgctctgtgtgcacccatctgtgcatgggtgaccatgaaagcctctgtgtggttgacaccatctctgctgagggtggctgcccggcccctcgacttgtcatgctcatagccagtagcctcagtcccgcctgcgagcagctccggggagcccaggcctgcctcacggccctcccccacccgcccctctctctgcagtcaagccaagccagaccccgcagccgaaggacaagtgaagcagccccctgagcctcacaaggacctcctggctggtgaggagggggccgcgccaggctcccaggcctccacagagtcttcagcgcatcccccaacagcagcccctgccagtccctcgggtccaggcaaggccctgggggtctccttaaatgccacctcgggcaagtcccagtcccagtcctcggccacccccagctctggatcccagggccagctgccctctggctctggctgtggctcccgcctgtccggcagggcccagggccagcgtcgggcacagggcagctcccactggtctcggcaacacacccagccgcctggtacttcctccagcccctcccagtcagccctcccgtcctcggggcccctgcagccacccaacgtcacctccagcccggtctcacccatggtccagtctcccagcagcagcaacatccccacgcagccccccagcaagtcctctggcaagccggaggacgcagcccccaagaccagcggacagcgccagaaggaatcgtcgaaacagcctgccagcagcgcctcagtgcccgagctggtcccctgccattccgggacctctctggagtacacttcggagtccaccaccgagatcacctgcagctggccacaccacaggcccccgtgcctgcagcactactggtgcctgaaacacctggcctgctaggaggctccaataaagctaacccggaccagacctgtgtgccacgtgtgcggggggcccaggggaggggctgcgagggcaccgtcccatttcatcaggcatgaatcccggctgtgccgaccagccccataatatagatgaggagactgaggcccagaggctaattcacccactcaaggtccacccacatggccaggatgggtgcaagccccggaaaagcttgtccttaatcacagtgctttctctcctccctcccgaactagttgtctggcctatttgcattagcctgcttctcttaaaactcccccatttgggtgcggtggctcacacctgtaatcccagcactttgggaggctgaggcaggtggatcacctgaggtcaggggtttaaaaccagcctgggcaaaatggtgaagccccatctctactaaaaatacaaaaattagccaggcatggtggtacatgcctgtaatcccagctacctgggaggatgaggcatgagaattgcttgaacccaggaggcagaagttgcagtcagctgagattgcgccactgcactccagcctgggcaacaaatgaaactccatctccaaaaaaaaaaaaaaaaaaaaaagtgagtaggataaaccacaaaccctgatatattttcccaaggggccataactcagttattctcaacccagaacagttttgtcccccggcctttgggtcttgtctggagacacttttttttttttttattgatcattcttgggtgtttctcacagagggggatttggcagggtcataggacaatagtggagggagggtcagcagataaacaagtgaacaaaggtctctggctttcctaggcagaggaccctgcggccttccgcagtgtttgtgtccctgggtacttgagattagggagtggtgatgactcttaacgagcatgctgccttcaagcatctgtttaacaaagcacatcttgcaccacccttaatccatttaaccctgagtggacacagcacatgtttcagagagcacagggttgggggtagggtcactgatcaacaggatcacaaggcagaagaatttttcttagtacagaacaaaatgaaaagtctcccgtgtctacctctttctacacagacatggcaaccatccgatttctcaatcctttccgcgcctttcccccctttctattccacaaaaccgccactgtcatcatggcccgttctcaatgagctgttgggtacacctcccagacggggtggtggctgggcagaggggctcctcacttcccagtaggggcggccgggcagaggcgcccctcacctcccggacggggcggctggccgggcggggggctgacccccccacctccctcccggacgggtcgactggccgggcagaggggctcctcacttcccagtaggggcggccgggcagaggcgcccctcacctcccggacggggcggctggccgggcggggggctgaccccccaacctccctcccggacgggggcggctggccgggcggggggctgacccccccacctccctcccggacggggcggctggccagggtggggactgacccccacctccctcccagatggggtggctgccgggcagagacgctcctcacttcccagacggggtggctgccgggcggagggtctcctcacttctcagacggggcggctgggcagagacgctcctcacctcccagacggggtcgcggccgggcagaggcgctcctcacatcccagacggggcggcggggcagaggcgctccccacatcttagacgatgggcggccaggcagagacgctcctcacttcctagatgggatggcggccgggcagagacgctcctcactttccagactgggtagccaggcagaggggctcctcatgtcccagacgatgggcggccaggcagagatgctcctcacttcccagacggggtggcggccgggcagaggctgcaatcttggcactttgggaggccaaggcaggcggctgggaggtggaggttgtagtgagccgagatcacgccactgaactccagcctgggcaccattgagcactgagtgaaccagactccgtctgcaatcccggcacctcaggaggccgaggctggcagatcactcgcagttcggagctggaggccagcccagccaacacagcgaaaccccgtctccaaagaccttgtctccaaaagaaaaacagtggtcagtcaggcatggtggctcacacctgtaatccccagcaccttgggaggccaaagcaggtgaatgacctgaggtcaggagttcgagaccagcctggccaacatggtgaaacactgtctctacttaaaaatacagtaattagccaggcgtggtgggacatgcctgtagtcccagctacttgggaggctgaggcaagagaatcacttgagcctgggaggcagaggttgccgtgagtggagatggtgccattgcactccagcctgggcgacagagtgaaactccatctcaagaaaataaaaataaaaaggctgggtgcggtggctcacgcctgtaatcctagcactttgggaggccgaggtgggtgaatcacgaggtcaggagattgagaccatctcggccaacatggtgaaaccccgtctctactaaaatacaaaaaattagctgggcatggtggcgtgtgtctgtaatcccagctacttcggaggctgatgcaggggaatcgcttgaacccgggaggcggaggttgcagtgagccaagatagcaccattgtactccagcctggcaacagagcaagactctttctgaaaaaaaaaaaaaaaaaaagagtgttccaggcagagggcacagcctgtgcaaaggccttgaggcaggaccacgctggtgagtgggaggcacagagaggaggctcctgtggctggagcagagaaggggaggagggaggaggggaggagggaggagggaggaggggaggggggaggaggggagttttcggggctgcaccacacaggcactgggggcggggggtgcactttgtcttttttttttgagacagagtttcactcttgttgcccaggctggagtgcaatggtgggatctcagctcaccgcaacctctgcctcctgggttcaagcaattctcctgcctccacctcccgagtagctaggattacaggcatgcgccaccacacccagctaattttgtatttttagtagagacagggtttctccatgtccgtcaggctgttctcaaactcccaaactcaggtgatccacctgccttggcctcccaaagtgctgggatgacaggtgtgagccactgtgctcggcccgggactttgtcttttactcggggtgaaggatttatcagagcaaagggcaagggtaatcattaatcaccccccaccctgtgtcggtgatcacacggggatggcagacggggctctcagaatctgccgatcactggcccagctggtttgaagaatgtggtctggtcatggccctgagggaggagagagggtgccaggctcgctctgcacctggcatggtccctcactttcactggcggggagcagcaaaactggctctggcctgcccaggtcagcacacccagggagcacaggtggggaggaggacacacttgtcttaccaggtggaaatgtgacctttagcccctcaggcattttattttatttttattttgtattttttaaattttatgtttgagacggagcctcgctctgtcacccaggctggagtgcaatagtgcaatcttggctcactgcaacctctgcctcccgggttcaagtgattcttccacctcagcctccccagtagctgggattacaggcgcgcaccaccacgcccagctaatttttgtatttttagtagagacagggttttgccatgttggccaggctggtcttgaactcctgacctcaggtgatcctcctgcctcggccttccgaagtgttaggattacaggcgtgagccactgtgcccagctctttttatttatttacttttatttttattttctgagatggagtctctctctgtcccccaggctggagtgcagtggcacgatctcagctcactgcaacctccgcctcccgggttcacgccactctcctgcctcagcctcccaagtagcagggattacaggcatgcgccaccatgacctgctttttgtattttcagtaaagaccgggtttcaccatgttggccaggatggtctcaatctcctgacctcgtgatccacccgcctcggcctcccaaagtgctgggattacaggcgtgagccaccgcacccggcctttattttttcaaatagatagggggtttcactctgttacccaggctggagtgcaacaatgcaatcacagttcactgcagcctcgacctcctgggctcaagcaattctcctgccttagctttgcaaagtgttgggattataggcatgagccaccacagctggcctaaaggggtctttaaacaaatggaggccgggctcggtggctcatgcctgtaatcccagcactttgggaggccgaggcaagcggatcccctgaggtcaggagttagagaccagcctggccaaatggtgaaaccctgtctctactaaaaatatacaattagccaggcgtggtggctgttgcctgtaatcctggctattcaggaggctgaggcaggagaattgcttgaacccgggaggtggaggttgcagtgagctgagattgcgccattgcactgcagcctgggtgacaagagcaaaactccatctcaaacaataaataaaaataaaaataaataaaagaaggaaagagtggcagccaggtgcagtgtctgacacctgtaatccagcgctttaggaggctgagacaggagattcgcttaaggccaggtattcaagcccagccttggcaacatagagagacaccatctctacaaaaaagaaaagaaaagaaaaattagccacacattgtggtatgcacctgtagtcctagctacaccagaggctgaggcaggaggatcactggagcccaggaggttgaggctgcagtgggctgtgaatgcgccgttgcaatccagcctgggagacacagtcagaccccggctctaaaaaaataaaaataacaaagataacaaaacgttcgcttgtcggctttaaagctaaagcgcaaatctggagactgtttattgccgatggttacgtggttctcactggaaacaatgttgtcattttcaaatcacgctggggtcctctcgcccacgcaggaatggcgtgctcctggcggtgggggctgtgggacacctggtgcgcgtttctcccagcgcctccgtgtttctccctggccgcaggcacagcctggggtccctgttgaggaaactctccgagtgtcagctcccctggccggttgcgcagcccctagggtaactgtctgagatccaggcgccggggcagcccagggggtccgtggccgggagagaccttgaaacctccattccctgggacaccccaaaccacagccggggagaagggacagccttacagactgacaggggagggagggcagtggggtgccggcaggcaccgacagtagcctcatgagccagtgctgtcacgaggaggcctgcgagagggccccgcgtccaatgggaagcgagtgcccacgcggaagtgggctcagggcacctggggccacaagccacgaggcgcgcccggagtcccttcatgtcccgtcctgccgccagggggcactgcggcccccactcatccctgcagcacccgcggcccttggctggggagcccctgggacccccgccggcagcgcgtgctgcagacatcaatcacagaaggcaccacgtcactgaagcgccaggcctgggccgtcccaggctccgctgggtccctggtatgccgtcggtgctcaataagcacttgctgcagaaatgtgtgaaggaaaaagggggctagggaagggctccaggaaagtgtaactcccatgtcagagctgggaggggcttcgagggcatcactcactgagcgggaaactgaggctggagaggggctgcacctggcctggggtcatctgcaagatcaggggccgtgtccaccaatgtcctgcaccccttgccgactccctctgcctcggccgcctccttgcccttcaccctctctggttgctccctgcctggtgggggtagcttgtccgtgcccagtggacagcggggacccatggaccccaggcaccccaggccccagggagaaatgcaaccactggtcccacacagagtgggttgtcccgggtggcagcatgagccatgcatcaggcgtcagaggcagagggttggcaccccacggaggagggtttgctgagcgacctcgtgacaccccctagtacacacacagcccgtgtcggccctcctggttgcagaagaacatagcgggctggcagctggcagacagcagcggctctcacctgcctcctcacctggggaggggttcccagggtgggcctgagaaagtatgtggcagttgggggaggctcaggacctaccaaagccccattcattccccacctgctcctatcctcctctattccctgccctcacctcacacagtgtcagacgtgcagggaggaggtgaggctggaccaggaggaggggtggggtgcgtgtgaacatgcgtgcctacccatgagcaaggtcgagacggggttctaccagcgtgtccctgagtctctgtgaccgagtgcatgtgactggggtgcttaaaaaaaaaaaaagtgctctgcagccataaaaaaggatgagttcatgtcctttgcagggacatggatgaagctagaagccatcattctcagcaaactcacacaggaacagaaaaccaaacaccacttgttctcactcacaagtgggagttgaacaatgagaacacatggacacagggaggggaacatcacacaccgggtcctttgtggggtgggggccgaggggagggagagcattagcacaaatacctaatgcatgtggggcttaaaacctagatgatgggttgatgggtgccacaaaccaccatggcacgtgtatactaatgtaataaacctgcacattctgtacacacccagaacttaaagtaaaatttttttttaaaaagtgcttgtaaaaattaaagaggaataaaaggggggtgaacagccagtacgatagtgcatgcctgaaattccagtgctttgggaggccgaggcaggaggatcgtttgaggccagtagttggagagcagtgtgggcaacgtagcaagaccccatctctacaaaaaatttaaaagttagccgggcatggtgattcacacctggagttccagctgctgtggaggctgaggtgggaggatcgcttgagcccaggaatttgaggctgcagtgagccatgattgcaccaccgcacttcagcctaggtgacagagcaagggtctacctcagaaaaaaaaaaaaaggaggagcaagcacgtgttgatgggtggaaatccagccagaaatgctgaggctgaaaagattgtctccgagtttcctggtagccaggggaaaaggggaaattggtacgttggtacgttacagtgcctggttaggcatgtcttctaaggggcatgcctgtttgtgacagtgtctctgcccttcacacatgagggtgtgtgtgagtagcagagagcagagacagcacagtgtctgggaagtaaacagatgatcttctgggtacccagggcagcagggtgtcatgctcgttcatgacagtgtctccaagcaagtgtgacgcgcgcaaagagaaagaaagcagcgttaaactttctgagtataaatagctatgagcttcctggcagccaaggagagaggcgaaataaaagtcagagtctccttagtgcctcctcaccagtgcctgccggcttgtgacagtggctttgactgcatgcagaggtgtcttaagcgtgtgtgggagggagtcacatagctgcacaggtgggacgtatttcagagctgcctggaagccagggtgagaggggaaatacgttgacgttgaggctggtcagatgtatctttcttgctgtgtgtggccggggctcctgcaggggctcagccaggacagcgccgggcagtcaggcgtatgcggctgtcctccgcagggctccagggccgggcgtagccggcgtggggcagcagcagctggtcctgtgtgccgtcggggctgacaagacgctggacagccatcaggtagtcccggtggggtgccagcatcgggcaggggcagtggcctggcgcccacacgtactcgcgtgcccgcagtggcgagcggttcttgtagacgagctggatgcgcacctcatagcgggtctcctgggcctggtggtggtggcccagcactcgggcctggaacactgttgaggggacgtgctaagctggctggctgctcaactctgcgcaaatctctacgccccctcccttgccagaagagggactgagggtcaggtgggacctcgggatctatagggactagagtcaggatcacgtcagggatcaatgagggattagggtcaagaggcaaattaggatcagaagaaggggtcaagggtaaagtcagattagggtcagaggtcaggaggaggccaggttagtaggggctaagtcagggtagaggtcgggggtctcaccaaagtcactgccgcaatagtggagtagtcggtgggcgcggccgcgggtgtcagggcagggtgggcaggggtctgtgggatgggcggtgctgtgaggggcacaggcctcagtccccactcatcccccaccctggctgtccccacctcacctggggccagcgttggggtctgtgcaggggtgacagcaggggctgcggggggctgaggctccaccccccggggctgaggctgcctcaggggccagcccagggcctgcacacgagcctggaaggggctgtagcgctcccgagggagccagaactcaaactcgatgccagggttgggctcctgcaggaggacctggagcaggggaggggacacagggagcttcacaggaggctggggttgcctcctgcctctgaccctacgaccccagcctccccactttgatcctgtctgcccccagcctccctcctctgatgctctgtccctagctgatcccctctgaccctgtccccaccctcccccctctgatgctctgtcccagcctctcccctctgaccccagactcccccttctggccccagtcacctccactcctaccctctgtccccagcctctcccctctgtccccagccgaccccctctgaccctgttggaggcccagtggcacctgtaggagcaggtcatgggaggtgggcccggctgcttgcaatgtctcctggggccctgtgtctcgggtgtagaccacatgcgtgccggccgcctcgtaggtccctggtgggctgaccacccagtgcccattaagcacgtagcgcccatcgccccccatcagtgctgcaagggaacagtcagccctcaggaacctgtcgtctcgtctcccagaccctggggtcccctcctcaggcctcagtctccccatctgtaaacagggacaaccgcccccgggtgcccagccgggtgcctctcgcctcacatcctaggatacccaggtggttgcggctcctgtgttccacgcggatgtgtctggcgccctcggggatcagggtcacgttccagtacccagcgaaggcacctgggtgggagggtaggagggtgttggggtgccagtgggggtgtatttgagcgatgacttgaggatttaatgagctactgcgggtaagacagctagccagggtcctgggaaccggaaaaccctccgtaaacgtttggagttacaattactattgcttcagtgtggcagggaaagggttaaaaccccatctgtcctggggaagggcgggacaatctgtcagtagccaatcaggatgaggagaaaggggggctgggccgcacactggccaatcagcacggaaatttgcttccgggccacggctcgttaaagggcccactctgacgtgtgtgcagggagggcggggcaggtagtcaccggcgtcacgaaacacgcgctgcacgaaaaggcacgagtcgttggcgcctccgcagcggccacagcggtcctcgagggcacccgagcccaacaacccatcacagccggcgctctaaagggtgaaggacaggcgcggcgtcactgacgctgggaggggcaggacctggggaaagggcagtgcctgggagcaagaggacgaggcctggagggaagatgggggtggagcctagggaggagcaggacctggcgggaggaggatgggcttggcgcccgggagtgggtgcctaaggggggctgggggcagggcctggaaggggagggggaaggcggtggagcctagggagggggtggaggctaatgggaggagggcggaggtggagcctaggatgggtggggcctgagtgggaggtgggcggggctcgggcggggcctgacgagtccttacaaggcagcggccagccacgcagaccccctgggcacccgggctgcaggcggtgccgtccaggacgcggccgaagctgtggtagaaggcgtgcccctcagccaggcagttgaggtcgcactggttgggcgctgagggcaggaggagtcggtgggccggggacccctgttcgagctccagtccccctctaccaagcttcatcaggcaaccatcactttgggcagatgaagcccagagatttggccaaagccacacatcgaggctgaggcagagccaggactggaccgtaggtgctctgcgtccagcaacctgggactcgcaggcaagtatcctggggctgcattcattcattcattcattcattcattgtctttatattaggagtccttacatattattcatttttaacaccattactcattcttcattccactgaacacctactgttttccagacactgttccaagctctaggatacagaagcaagaattcaatcagtgtgcagatggatggccttaaaaaaggccaggtgtggtgtctcatgcctgtaatcccagcacattgggaggctgaggtgggcagatctcctgaggccaggagttcaagaccagcctgggcaacatggcgagacccccccgtctctaccaaaaatacaacaataaaaatttagccaggcttggtggtgggagcctgtaatcccagctactccggaggctgaggcaggagaatcgcttgaaccagggaggtggaggctgtagtgagccaagatcatgccactgcactccagcctgggtgacagagcgagactccatctcaaaaaaaaaaaaaaaaaaaaaaaaagaagatctgagcatctggcccaggcaccagcaagtacccaatgaagtgtttgtccagtactgactggactgagtcccgcacaactgagctgtgtcgctggtcctccctgggcctcagtttccccttctgcctggaagtggggcaaaatgagctgtctgatcaaacacaaaggccgacagccctgatctccactcctccttctccagctccttctggctcccatttccctgagcctggctggtggaccctgcctggaacggatcctgggctggccctagtgggcctctgcgggggtgggatcacagcaggtttcctccaattctcagattgatggaaggaaggaagggagggagggagggagggagggaggaaggaagggaagggagaaagggaaggaagggaaggaagaaagggaaggaaggaaggaaatgaggttgatggatggcactttgtccattctaggcttttcttatatctgtgtctgccttccccatggcgtgtgaagctgcctgtctccctgaaatctggaggcgcactgacccgggcacgtagttatataactcgctattttcagctcaatgcagcaacatttcctgctactgggataagtttgagaagtgttggcctctggatacagctctaagtcaatccttagttgggtgttcagccctgtgcagaatgaaccctgcttccctctgcccctgtttcacgcctaacatatgctgtttctgtttcactaactcctacatatccttcaaagccctagcactaataccctcttctctttgcaaccctccaagaccctctccctgagactaatgagttgttcgctctggaccaattctgaccacaggagaccagactactcacccccatggaagggcacccactggtaggtcttctgggtgcccaggacagggcggccattgtacagggcacactgtaggtctcggaagggcacagcccctggggggcagtcctagggacagagataggtgagccagaggctgggacaaccccaaggggcaggtggtgggcttcaggcagtctggggtgggagagtggtctgggaggtgggcagggcttactggcaactggcagaggcggtactcatgggagtctccccagcacggttcttccccaggaagcctgaagggagacagagtgtggcgagaacccccagggaccccctcccagggctggccttccaccctccgcccccgccaaccccacccgcattccagcgggatcagggggattaaagggcacagcatgtgtgggcaggccgagggtgcggccaggggccgggctgggccggcgggggaggaggggcagggaccccctccgggccccgctcaccggaggcagcgccggctgcgcacagagacgccacgcccgcaggagctggagcagcgggtccaggacacccacggggtccactcgcccggaccctacttggggagacagaggcacggtcagccttgtagggggacgctggtgaccccacactgctgactgggtccccattcccactcgccaccccctgggctcatgcccccccttacctgagcactgacccccaaaccacagttcagcagggcccacaggaagagcaggaggttctggaagaggtggggcctggggaacagaggggccgagtccatagagccaccgccagagacacagggttgtgtcccggctctgccctgactggctgtgtgatcttggaaagtaactaaacctctctgagccctacctctcgtctctgaaaaacggggtaatagagcctcccttacaggaaagttgaggggtcctgtggatcaggtaaagaagacaggagacgtggagcccggtatggagaggaagaactcagaatgtcatctgcaattattattgttgttagttagtttgtttttgagacggagtctcgctctgtcgcccaggctggagtgcaggggtgcgatctcggctcactgcaaccctccccggttcaagtaattctcctgcctcagcatcccgagaagctaggattacaggtgcctgccaccacgccggactaatttttgccgttttagtggagacagggtttcaccatcttggccaggttggtctcaaccttctgacctgaagtgatccacctgctttggcctcccaaagtgctaggattataggcatgagccactgcacccagcctacaatattattgatatgtgtattgtgctataatgcagacagtaggtgcttaatcgatgcttgatgattggagggatcattcaaaaatagtacacaggtgcctcctagggctggggccccctccccgccctccccaccatcactgcttctacctttccgtgtggcctgaggccagccactccactctcccaggcctcagtttccccatctgtgcagtgggggccaagtggactcagtccatgattctgtgacaccctgcggaaggtgcggccggcaggggctggatcaggagttgggtccctagaagaggccctcagctgcaccccggccccagggctccctcagctcccagacagcagggagtcccccggattggggatgggacagggagggggtgacctggcccaggtccgttcggtgcctcatggcctcatcggcggagggggtgggactgagctccggggcagcccgtggagggaaggggccactgctgaggctggagcagggaaggggaggaggctgactgcctctctgggccttagtttctccatcctgtcagggcagggatgaagtcacttgccatccacaccctcctcatgaccccagcctgcagggggaaagaggggggaagggaagcagccgccaagtgagccagggcgtcctgctgccagcagagcctgaaggcaggtgggtgagccccggcccgggcaccagctggggaagaggctgggtcccacctggaccctgtttccctggctccagcatttggacttctgaggcaccaagggtctagggtcctgggtatctctaggtactgagacagctgtgtggtctgctgcatccgtgcccctctctgagcctagagcctgggctggcccaggaagcaggaagaagtctgcaccagaaacttaaaacaaggggaggggggccaggtgcggtggctcacgcctgtaatcccagcactttgggaggccaagacaggcggatcacctgaggtcagaagtttgggaccagcctgaccaacatggtaaaaccccatctgtactaaaacacaaaaattagcccggtgtggtggtgcacacctgtaatcccagctacttgggaggctaaggcaggagaatcgcttgaacccaggaggcggaggttgcagtgagccgagatggggccaatgcactccagcctgggcgacatagtgagactcagtctcaaaaacaaccaaccaaccaaaaaaaacagggggagggggcttgaccttctgaccacccccaccggactctaagcctggtttgaggagtgggggtctaggtggtgaaaagtggggggctacaaggaccaccctaccccctcctcaatgggccctgcccagaatcaaggctctcccctccccgtgtgggctgcagcccggactggcggagggatctcaaggcaagccgcacctctgggcctcagtttcccccggagaaagtgggaggataggcagatggacttaccggctgcgcggagcccaggcagcgcgtcccggctccctgagcggccccagggcgagcggaagcggcggggcccaaggtgctgggcggggtggggagcctgggacggtccctcccaccgcggcctccgcaggcgcgcccaggcccgggtcaggaggggcggcggccccgggcgccctcgcgcggcgggcgcggatctgcggcaggggactgcccggcggacgcgagcgcaggggtcccggagccgcaggctggtgtcgggcgcccgggtccgggtgaccttggcaggctcgggcgggggcgcggcgcggggactgaccgccctcctctgccccggggctgctattccgggcgccgcgctcagggcccgggaatgtgcgcgaaccgaggtcaccccgccctgggtctgggagtcccgggcgctgcccctaccccgccgacgcccggattgcgtcccaccggcgtccccatccccggtcacagccccctcccctggtcctgcccctcacccctctcgcggggggtcgacctgctcgtggatggggaccctggcgcgcctgggctcccatccgggggttccccgacccaggtcccggtcacccccagcgcagggccccagcgcactggggagaggctcggccccgtgggccgcgcgcggggggcggagagaccctcccagctggcgcattcccgggcgctgctgtcaccaggggacgcgccccaccccgcctcccgccctccctgccgggccccggggctgccagcggggcttcagagccagacccgggtccaggcggtccctctccctcacagccgcggccacaccctctccggcctcagtttccccatcccagcagtgggcccggcagggatctccaccgcgaaccttccatctggaatccggctctgcgcggaccggcaacgcgagggggcaccccgggactccccccaccccaccctttcccgccgggcgtctgtgagccgccccgtgcccacccacgcagggatgagaccaggccctgggttctgggctccaccagtttctggtgtcgccccacggcgccccctggcgggcgggctgagggactggggcactaaaggagggggtggagggactgtcctgctccctgggctccacccaggctcggtctgagcaccccctcctccaggaagcccaccctgctgtcccacagcgctgaccacagggagagaggtttgctggggacatacagggtgttgctggtccaactcagtctgccctccagcctgtagcatgtcagcagagccacccatatgccatttattgagcacctactgtgtgcacagctgtgaacaacccagccagtcccaggccagcgggtaaggcagccccctggaatgtatgaccccccaccttctgacctggactattggagaaaatagcccaggcccaccactgatggccccaggttggggggtggtggttgcggggatgtcaagaaggccctcactgaaggggtcaagagagaagggcaggccgggcgcggcgcctcatgcctggaatcccagcactgtgggaggccgaggcaggcggatcacctgaggtcaggagtttgaagccagcttggacaacatggtgaaacccagtatctactaaaaatataaaacttagccaggcatggcggtgagtgcctgtaatcccagctactcggaagactgaggcacgagaatcgcttaaacccgggaggcagaggtggcagtgagccgagatcacgccactgcactccagcctgggagacaggcgagactccgtctcaaaaaaaaaaaaaaaaaaaaaaaaggaaagaaagaaagaaagaagtcagctcaggacatgtgtcaatgtgtcattaggacaattgtatcctcctcagatgtgccccattcccagatgtccagtccacagagctccactgggagtgcagacagcaggccctgtgccccgcagggaaggtatacagaaagcacagcgcccacagggagcacacacagcaggcattatgctctgcaggaagggtatacagcaggtgctgcatcttgtagaaatgcatagagtagactctgccctgcaaaggagtgtatacagtagatatggcaccttcagaggagtgcatacagcagtcactgcatcctgtagagagtatatacagcaggtgctgcatcctgcaaggaaggtatacagcaggtgctgcatcctgcaaggaaggtatacataaggcgctgtctcctgcagggagcgcatacagtaggcactgagttctatggaaagtgtaccccgcagcccctgttccctcctgggagtgcataccgcagccactgcaccctgcgtgggggctctagagctggcaagattggcagaggtggtggtgaagatgtggagggctgccccccacccccagttcttgtcccctaccgtctcccacctctgtcctctggatgtccctaggaggaggctgggagctcagcctaagacacccggtgtaggtggagggggtggctgctgaggctcagaggctcctggggtcccagttgggcggggtcccagcttactacattcccctgcccttgcctggaccctgacccaggaatcagccgagtccccctactctgaatttcagcctggaccccctccttgaggcagcgtcagggctagaggggagactgagacgcgggtcccggcggatgtggatcaattaggttccatttccttcatggttgtatggccttgaggcttaaggaatgccgcgatctgctgtgtgactgggctacagtgaacagtatggtaccccacacttcaaactgtgttcacagggtagatttcatggtaagggttcttaccataaaagaacaaaaacagtgggacacaagggacctcgggaagtgacaggtaggcctgtcatcttgagtgtggtgactgcatatgtgcaaactcatcaaattgcagacactgggctgggcacggtggctcacgcctgtaatcccagcactttggggatccaaggccagtggatcacctgaggtcaggagttcgagagcagcctgaccagcaaggtgaaaccccgtctctactaaaaatgcaaaacctaggacacggtggtcccaggatacctcaacctcctgcgtggactgggtggggcctccccatccctgccccacagacccctggaccccccggtccctggggctgtccgtctgttcctgggcaccagcaggggccacgcagagttgggaccctccccggctggagtcaccccatgggactcagggccctggaccctccttggccgctgctcgcccggtcctcattctgtgccggtttcttgtgcacgctcggaatctgttccctgcaggcacccagtgccccgggcaccgtccagaattcctggaagagacctcttgctttcttaccccactgcccaggctccaggcctgtgacatggcctccccagggtgccccttcccctccaccttcacgtgctgaaaaccacctgttctgtcactttcaggcgacgtggatcaggtggactggcccacctcctccattgtgtatgacgtaacccatgcttggccaaacagataattccatctcctagagacggggattggctgggggatgaccatgtgacccaagtgggccaatgagagcctgccctgggacttgaactgggccattagaggaaaaggtggtttcccgtggctggggtgggctccagggatggcgtgagttgaggtaggctggactttcttgactgctcgaagagatgcactgtctcaagcagatgctgacagacggcagcaaatggaaggggccagatttcttttttttctttttatctttctgtccttttctttctttttttacttttttttgagacagggtcttgctctgtcgctcaggctggggtgcagtggtgcaatcacagctcactgcagccttgacctcctgggctcaagcgatcctcccacctcagcctcccatgtagctgggactacagatgcatgccatcacatctggctaatttttttgatctttagtagtgacaggatcttgctatgttgtcccgacccaggctggtctcaaactcctgggctcaagagatgctcctacctcagccttccaagtagctgggactacagacatgcatcaccatgcctggctaatttttatattttttgtagagttgggggtctccccctgttgcccaggctggtctcgaactcctgaactcaagtgattctcttgcctcagcctcccacactgctgagattgcaggcatgtgccacccaccgtgcccagcccaaaagtctagatttctgagaaggttgtttgagttcctggattgagcctcatctgaaggcattcatccattttttttcactttagcaatttttagtttcttactttttttttttttttttgccagggtctcgctctgtcatccaggctgtactgcagtggtgcgatcttggctaactgcaacctctgcttcccaggctcaggcaatcctctgggatcagcctcccaagtagctcggactacaggtgagtgccattatacccagctaatttttgtatttttagtagaggtggagttttgccacgttgcccaggctggtctcaaactcctgagttcaagtgatcctcccaccttggcctcccaaaatgctgggattacaggtatgagccactgttcccaaccttattttagaatttttaaaaaatttttattattatagagacaaggtttcaggaacgaaactccgtctcaaaaaaaaaaaaggtgataacaattactatttcatgattattgactaaattccaaatgttattttatttggatttggatttcaccaggcttgtttttttgttttttttttttttttcagatggagtcttgctctgtctcccaggctagagtgcagtggcgtgatctcggctcactgcaagctctgcctcctgggttcacgccattctcctgactcagcctcccaagtagctgggattacaggtgtgtgccaccacgcctggctaaatttttgtattttcagtagagacagggtttcactgtgttagccaggatggtctcgatctcctgacatcatgatccacccacctcggcctcccaaagtgctgggattacaggcgcgagccactgcacccagccttttttttttttttttaaacaaatgtcctttttctgttcctggattccataagacattgaactatttgtctcataattagtaaaaagacccatgcagattaaaaatggattatttctgtggtaatcgggtgggttctgatgcccatgcagcaccttgaacacggctggagttgatgagtatccctgatgggaagtcgatgctgcgtccatggagagaaggggcacggggttgagtgtccacccagcacctaatggagatacagaccctctccctgccactggcgctccctgtcaggtgggacagacaccagcaagctagcaaggaaaccatcattctgggttgtggtggaactggggagaagcaggcatggatcacgtctagggcatcttggggcaggggcggcctcctgggcacaggtggccctttcctgcctgggcctaaaagctaagaagaggatgccaggcaaagtctgggagggtggcagagggaacagcacatgcaaaggccctgtggcagggtgagcttggtgtgcgtctgaggacaaatgggaaggccagaaggttgatgtcttggccttgtgtcctcatcttgggtggtcaactctggggaatgttgtattcagttcctcagagggtgcctgatgagtgtgggactcagggtgccccgggggtacccagctcccaccctgctccctgaaccaactctctgcactaaagccttgcttcaggctctgcctttgggggaacccacacagatgggccaggagggttgagtaacctgccccagctgccagtgctaaagccacccacctggacaatgtcagtggaggaagtgaagagagtgggtgagaggccccaacactgaaccccaggctcccaggagaaggaggaggtggcttaaaggagaactggaaaaatgcatccagaaagatgggaaggggccaggcgcggtggctcacacctgtaatcccagcactttgggaggctgaggtgggtggattacctgaggttgagaggtcgagaccagcctgaccaacatggagaaatccggtctctactaaaaacacaaaattagctggatgtggtggtgcatgactgtaatcccagctactcagaaggctgaggcaggaaaatcatttgaacccgggaagcacaggttgtgctgagccgagattgcgccattgcactccagcctgggcaacaagagcaaaactccatctgaaaaaaaaaaaaaaaaaagatgggaaaacatcaggagcaggggtgtcccagaggacaagagaggacggtgcttttattattattatttttttttttaattttttttttgagagagagtctcgctctgtctcccaggctggagtgcagtggcacaatctcggctcactgcaagctccgcctcccgggttcacgccattctcctgcctcagcctcccgagtagctgggactacagccgcccgccaccacacccggctaattttttgtgtttttagtagagacggggtttcacagtgttagccaggatggtctcgatctccttacctcgtgctccacccgccgtggcctcccaaagtgctgggattacaaacctgagccaccacgcccggccacttttattattaattattattattattgtttttgagacagggtcctgctctgtcacccaggctggagtgcagtggtgccatcacagctcactgcagcctcaacctcctgggctcaagcaatcctcccacctcagcctcccaagtagctgagaccacaggcgtgcaccactccacccggctaactgtttattttttgtagagaaggggatctcgctgtgttgcccaggctagtctcaaactcctggactcaagggatcctcctgcctcagcctttcgagtagagtagctgggattacaggcatgagccctgcatctggacaacagtgcttttaggaggaaacagagttgagagagggaagaacagggcttggtttcggggcaccaagtctggacgccccctcctgcgctcacactgggccatgtcgtgcagcataaaccacaatcagtgggggtctctggagccctgtggtggtggtacgtctcctgcctgctctgctcccagggccatgggtccctgggcacctgcgtggtcaggcgtccaggcacgtgagacccacgggtgcttggtaaaggccaggagaccaggcagggaccagggagctgggctgagtcacattggttggtggcctccaccctggcgcctgccggaaggagggtgctggggaggcctgggccgccgctgacctcggaggcagccccatgagcctcctgggcctccagggagtcgggtgcctgctgtctcagctgccacgcctccacctgcagtaggtattttgagcaaagcttcccggcacttctccgcaaaatccgctgagtctgtggttttctcaggtcagcaaaagaacagagactggagaggaaatcgagcctgtggtctgggatgtgagaggtgctgggggtacaggggctgcagtgctagaccacccaggcctcaagaacccagggcagggggtaggatgggagggccaggtggccccattgaaccctgccctgcccctttgcaaaacggcatcctgtgctcatcacacaagccgtgcctcagtttccccatctgtaaactggggcattagtaggactatgtgttttagggggtagggaatctaatatatttttcccttttttttttttttgacagagtctcgctctgtcgcccaggctggagtgcagtggcgcgatctcggctcactgcaagctccgcctcccaggttcacaccattctcctgcctcagcctcccgagtagctgggactacaggcacccgccaccacacccggctaattttttgtatttttagtagagacggggtttcaccatgttagccaggatgctctcgatctcttgacctcatgatctgcccgcctcggcctcccaaagtgctgagattacaggtgtgagccaccacgcccgattaatttttgtatttttagtagagacagggcttcgccatgttggccaggctggtctcgaacttctgacctcaagtgatcctcttgccttgacctcccaaagtgctaggactacaggtgtgagccacagggctcggccaattctttttttttttttttttttttaacctttgaggtgaaattcacataacataaaatttaccctttttaaaatgcacaattcagcagcatttactgccctcacagtgttgaacaagcaccccctctatctaattctaaaacagttcatcctcaaaaggagacttgtacccaacagcagtccctccccatcccctaatctgtgtaagaggccttcagggagagctgaggggtgtctttgggggcattcatccttagccccccaaaactcccctggggcaaggctgtggtgagcagccagcctggggcagggcgggggatggggacagctggttaggagggctcacataggctgggggacagagtccctgctcagaggggcacaggctgggactaggaggcctttcccagctccatagtggagtctcagccaggaaaagccgcgggcggccaggggagagggagggcgagccggtctctgtgcaaggagcatcagctgacaggcgggctgcgaggctctgggccaggaactctgatttctttccccctaggaagctcagacacccgcctcagcacgagggccttgcctggcactgctccctgggactgctggggctggcagcctgaaagagggacagacctattgtggggggaccaggagctctggattcactcccacctagactccaggctcagccacatgcagtccgcggtgatcctgggctggcaccggacgttcggagcctcagtttcctcatctgtaacacagggctaagaacagcacctgcctcagggacaagttactgcccagaacgggcctggctcacttccttccacctccaaagctttccttgacccctgacttggtgaagtcttggacgttcttgcagtccgttaagcagtggtccttttacgaggacagggctgggtctgccttgggctcgcacagcctgacacaggcccatatgcagtaagtgcttaacaaatgcctgaactgatgccaggatggactggtgctatcaggaaggaaccggaagccaggcctggtggctcacgcctgtcatcccagcattttgggaggccgaggcaggcgggtcatttgaggtcaggagtttgagaccagcctgaccaacatggtgaaacccgtctctactaaaaatacaaataaataaatacatcagctgggtgtggtggtgcatacctgtagtcccagctacttgggaggctgaggcaggagaattgcttgaactcgggagatggaggttgcagtgagccaagatcacaccacggcactccagcccgggtgacagagcaagactctctttcaaaaaaacaaacaaacaaaaaaaaaagcaaggaactggctttctgcccctggaggattccagggtgacagtcgtgtgacagctcagacactcgggccccgagcagcccaccttgcagccacctcacctgattctcatcagcaggggacttgggctccccagctgcaacccggtggccccaggctggccaggaatcttccgccctggccctgggaccagaaaccccgcaaaggtgcccgagctcagccccgtccaatgcacgggggccccattcgtgacaccaggtggacacgtgacggctcagaaggtgtttcctgtccctagtggtgtggccgggccagattccgaaatctggtccctggaaaattccagccccacggagcctggtaacccctccccattcctggtgttatgtaacatttggggattaataccgcaggcgtccaggggcggctgccgggattcaaacccagcgctgccctttcctgggctgactgagcgactttgcgtccctgggtctcaatgtcttgcctgtacaatggggacaaggcccgtttttgtgtcccaggctgggtggaagggtgagggaagacctcaccaggaaaggggtgcacctgagtctggggcagggcttggagcaaccacccccacgattccgggggagtctcaagccccccactgtcttcccacccagctgttctctgagttctctgaggtttctgatgctctctgaggtcgccatttcaaggacgtccccacctggctgtccgtgcaaaccccagccagggtccacctgctgctccacacagcccatcccttctccgggctgaagctccctcatatgggacatccactacactgtaggaccccagcccatgcgtccccaagccccggtcctgcctcctgggtccctgtcccaggcctcaccgccctccccaccagccccagcatcacaaacgctgggcttctctgccgctccgaattctgctgtggctccccagtgcccagggccatcaagccccaggttttcatgtgggccccagggacccgccagcagggaggacccgaaatggcacacattcagaacgtcgaggctcatacctcaagcgcactgtgggggagaagcccccggaagcccccaaccccccacgcgcgagagagcctcagtttcccgctcggtaaagcgggcgtatcagcggttcccagccagcccgggtgtgcagggtcggaggagctcgcgggctgagcgcggcccctggcgcccggttggcgtgcgggactcgggcgcgctctggtccgtggaacttccccagccgcggcgtccccgccgctcacgcgccccccactccacggccgggcacctcccgcccctccccgggctggacctgcgcccgggctccgccccctccccgcccccgcggccaataaaacgctccccggcggctcctgcgccctcagagcggccccggagcggccgcagcgcggtggtctcggcccggctgcgccagagtccgcgcgatggagccccggccgcggcggcggcgcaggagtcgccccctggtcgccgccttcctgcgagacccgggctcgggccgcgtgtacaggcgcgggaagctgatcggcaaggtgggaggcccgcgccccgagtccgcgacggggccggaccgggctgggctggggtcccggggcgcgcgggcgatcctgcgcggtctacgcggcgcgtccctgcgagcgcggggtctggagcgggcgcgcgtccggagccgcggggcctcccgtgcggggtttcgcatggcgggaaccgtgttgagcgcgctgtgcgtcgtgtccgtgggttgcgtgtccggggtgtgggcgtgcggctcggcctcgggatgcgacgctgtgttgcccctgggtgtgtgtgcgagcctggcgagggtctgagtgtgccgcgtctgtgcccgctgcttccaagtgtctgggtgctgtgcggtgttcgtgtgtgtgtgtgtgtgtgtgtgtgtgtgtgtctgggtgttgtgttgcttgttcacctgttgtttgtgcgtcatgcctttgtgtgtccagtcattgtgttgtgtgtctgggtgttgtgtgttcatgtggtgtgcttgtgtgtttgtgtgttcatatgtggtgtgtctaggagttgtgtgttcatgtgtttgtatctgtgtctttgtccatgtgttgtactgtgtgtccaggtgttgtgtgttcatgtgtttgtgtgttcctgtgctgtgtctgggtattgtgttgtgtgtccacacgtggtgactgtgtgtccagacattgtatattcatgtgtttgtgtgttgctgcgttgtgtatctgggtgttgtgttgtgtgtccatgcatggtgactctgtgtctgggcgttgcgtgtttgtgtgtcgtattcaggcgtggtgttgtgcatccggtgctgtcttctggtccgtggcctctatgcaccaggcgtggatgtgtctgtgtctgtgtctctgtgccttcttgtgtgcatcatgtcttgtgtgtccaggcgggagggtgggagctgtgtgttgttttttccccggtgtgtgtgtggagagacctggacgcgcctgcgtccctggctgccctgtgcctctgtacgcgctgccagcttgcacacccgtgcacacctgcccactgatctgctgacccctccccacagggcgccttcagccgctgctacaagctgacagacatgtccaccagcgccgtgttcgccctcaaggtggtgccgtgtggcggggctggggccgggtggcttcgcccgcagggaaaggtgcgtgtccccatcggtccccagggcccacagtccgcagcccgcagcgtgtcccgaagaaggccctgccctttggtcccagccctgggtggccatgagatcgtacaggaggcaggcgagcatcctgcagcctgtgccccgctgcaggcgggtacatgtcggggccgtgcctgcaggtggagcgtgagattgccctgcatagccgcctgcgaccccgcaacatcgtggctttccacggacactttgctgaccgcgaccacgtgtacatggtgctggagtactgcagccgccaggtgcccaggggcggggagagggcaggattcatgtcagctgtgcccgtctctgtccaccccgtgtccatctgcacctcgccgctgccccccgtaccatcctgtgtgccctctgctgtccattcgccagcgcttcttacgcctacgtagggccaattgtgtccatcctttactcacctgggcacacccaggctctcttgatccacctgggcccagcttacgctgtgctcatcaggcccgtctcagactcacctgtgaccgcctgggcccatcagaatgtgtttgcttcttcttggcccccttggactcacccatgcccacctgtacccaccagcatgcccctgtgcctacctgtggtcacctgcgcccctcctgcaccctgctgtgcccaccgtggccgtgaactcactgtgcccattaagtagacctgagcccacctgggtccacctgtgccagaatatgccccctctgcgttcactcctaatcacctggcccttctcaagctgacaagcatgtccaccagcgccgtgttcaccctcaaggtggtgccaggtgcggggccggggccgggcagctgtgcccgtggggaaaggttcgtgccccccctcagtggccacctgggcccatctgaacccgcatgctcctattggggtgggtcatctttgctcacctgtgtgcacctgcgctcacctgtgctcatcccataatcagccataccaccttggccaggctgagcttacatttgccttctaatccggggccgctggtcacccacagtctttggcccacgtgctgagggcgcggcagatcctgacggagccagaagtgcgcgactacctgcggggcctggtcagcggcctgcgctacctgcaccagcggtgcatcctgcaccgcgacctgaagctcagtgagtgccaggaaggggaactgtgggcgggggcgtcgggaggtgggcacggatccacccccatgcgcaatgcccctcccactgccaggtaacttcttccttaacaagaacatggaggtgaagattggagacctgggactggcggccaaggtggggccagggggccgctgccacaggtgagagccggggggagggctctgagcagtccgtccgggtgggcacggctggccctgaagtctggcacggggatcccagccttcctgagccccccatgacgcccttcctagagtactctgtgggacccctaacttcctggaccctgaggttgtctccagaaacggtcactcctgccagtaggacatctgggctctgggctgcatcatgtgagtggggtcctggagaaggtgggcagggcctccggggggggcaggtgtggcggggggggagcctgcacggaacaggtggggaccgttgtgcagggtggggcgcgtggaacaggcacctgtcgccaagtgtgcagtatgaacaggacgtgtgtggggaggcgtgtgtgagggaggacgggggagggtgtgcacagagaggtggacaggtgtgggcaggtggcagtggcacaggcaggtcagggcgtatgtgtacagggatacagcgtgtgtgggcgcagggcaggtgtgagcaggcatgggatagcattggaaggtggaggccaggcgcagtgactcacgcctgtaatcctagagctttgggaggccgaggcaggaggatcgcttgagcccaggagttcaagaccagcctggccaagttggtgaaaccctgtctctacaaaaattacaaaaattagccaggagtggtggtgtgcacctgtagtcccagctattcaggaggctgagttgggaggattgcttgagctcaggaggtggagactgcagtgagctgtgattgcacaacggcactccagcctgggtgacagaatgagaccctgtctttaaaaaaaaaaaatagaagcattgaaaaggtgtatgcaggtgagttcagggtgagccaggtgcaggcaggggatggacagacgctggtgtccaccaagcagggtccatgggactgcacagggtgccaggtgcaggcaggggatggacagacgctggtgtccaccaagcagcgtgcatgggactgcacagggtgctaggtgcaggcggatgttgggagatgaggaagccgatatgggttgcacagctaagctgtgtaggcaggtctggccaagtgtgcaggggtagctctgagcgatgcctggacacccaggttcttgccccccacctggcccaggtacacggtgctgactggcaccccacccttcatggcctcacccctgtcggagatgtaccaaaacatccgtgagggccactaccccgaacccgctcacctgtctgccaatgcgcgccgcctcatcgtgcacctcctagcacccaacccggccgagcggcccagcctggaccacctgctgcaggacgacttcttcacacaggtgggcggcggtcctcggcgtggggtccctggcgtggggtccctggcaggtgatgagccagagcctgccctgctcagccgagggaggccccgccctgtcccaggtaacccaggtgctcaggggctgggtgacctaagccggggataaccccaaatccccatccaaagggtttcactccagaccggctgccggcccactcctgccacagtccccccatcttcgccatacccccgcctctgggcaggatcttccggaaggtgggccagcggctgctcacccagtgccggccaccctgtaagtaccacccccgcccacacctgcccaacacctgcccacgcctcccacctgcccacacctcccacctgcccacgcctcccacctgcccacacctcccacctgcccacgcctcccacctgcccacgcctcccacctgcccacgcctcccacctgcccacgcctcccacctgcccacgccccccacctgcccacgccccccacctgcccacacctcccacctgcccacacctcccacctgcccacacctcccacctgctcacacctcccacctgcccacacctgcctacgcctgctacctgcccccacctgcccacacctcccgcctgcccacacctcccacctgcccacaactgccacctgctccgctctgtctccacatcaggggtgggtgtgggtggcaggtgcccccctacccccagcttggggcccaggctgtgccccctccaaggccttgtgcctccctcaggccccttcacgcctaaagaggcctcgggtccaggagaaggtgggccagaccctgactccatggagtgggacggcgaggtgagacatcggggtgggggacacggggagacacaggtggagggcatgctggcccctgctaaaaccccctcccccatgccggcttctctgaaccccttctggggtctccaagcccggccccctccccctagtcccgtcctgacgcatcagagctgggatccatttgtgtccaaatgtgcccacctgggctttcccaagggccgggctcgaggccatgggaagggtcccatccatggcttcagtccatcacatttattgagcacctactgtatgcctccgagacactccgaggctgcctcccaaggggaaagcagtgcctctgtgtgcagagcacggagggcacaggcaggggccagagcctgccacccacctcacgcctgtccctggggctggggccggggccacccccacccctgctgctcccacctcagagctccctgtctgcgaaagaggttccctgcctggaaggccccatccacctggtcgcacaagggaccctgcagagtgacctggccggtgagcagatccccgtcccagcccggggctgcaggtggggagggaggaattacaagtgacagggggaccaaggccgtggcttaccagggtcacagccgccgtcccggcctcacctttcccgcctgtcaaatgggaatgccgcctctgggttgaggatgagatgttcctggatggagccgtggggagggggactggttggaagagcctggtggtgggaacccagacctgtctgcggcacaaagacctgtcttcccagggcccgaggggagccggcggccagaggtggaggcggccctcagacacctgcagctgtgcctggatgtaggccccccgggtaggagccggcccagcccccaggatcacctttactcttactagccaagtaaaattgccttcattcccatcctgggccctcctgggtatttctgggggtgaggagtaggggtgagggaggccccaggacacggtgacatcaggagagtgggttagccctcctgtgtgcagagcctggcacggagggctctgcggcagccttacgtttcacggtctcttaaattcatgacccgggctcgttagagacccagtgagtgaggaaacgtgacctgggacgttggacacagagccctgtgcccacaggccacactccaaagggggacccctcttatccccagtgtcccagaacccaaaccctcttcctctcccctcctctccctgagcctccactgacccacacatactgccacccttagagagggagccccaaaccccacgccaggtctccagcccagaagccttttcttttccttttctttctttttttttaagagacggaatctcactctgttgcctaggctggagtgcaatggtgccatcttggctcatcacaacctccacctcctgggttcaaagcgattctcctgccttagcctcccgagtagctgagattacaggcgtgtgccaccacacctgctaatttctgtattcttttagtagagacagggtttcaccatgttggccaggctggtctcgaactcctgacctccggtgatctggccgcctcagcctcccaaagtgctgggattacagacgtcgtcagccaccacgcctgggcgcatttttttttttttttttttttttttttttttttgagacggagtctcactctgtcgcccaggctggagtgctgtggcgtgatctcggctcactgcaagctctgcctcccgggttcacgccattctcctgcctcagcctccccagcagctgggactacaggcacccgccaccatgcccggctaatttttgtatttatagtagagacggggtttcactgtgttagccaggatggtctcgatctcctgacctcgtgatccgcctgtctcggcctcccaaagtgctaggattacaggtataagccaccgcgcccagcctcaggaccccatctctacaaaaaaatgagccgggcatggtggtgcatgcatgttgtcccagatactcaggaggctgaggaaggaggatcacttgagctcggaggtggaggctgcagtgagctgagatcgtgccactgcacttcagcctgggcaacagagcgagaccctgtctgaaaagccaacagacaaacaagcaaaaacccagaaacggggcagggcgtggtggctcatgcctgtcatcccagcactttgggaggctgaagcaggtggatcacaaggtcaggagatcgaaaccatcctggccaacatggtgaaaccccatctctactaataacacaaaaattagctgggtgtggtggcacgtgcctgtgatcccagctactcaggaggctgagggaggagaatcgcttgaacccaggaggcggaggttgcagtgagccgagattgcgccactgcactccagcctggggacagagcaagactctgtctcaaaaaaacaaaacaaaacaaaacaaacaaaaacacacacacccagaaatgtgtagtattttcagagcattgcaagtatttgagaattgctcattcccaggggtgcgccagtatcccacagtctccctctgcaagccagaaattagttacggttccgtggcttctgttgatgtctggtctcctagaatccaccaccgaagcccccaagcctctgtccggtccccgccgtgggaagggtctcacccatggtttcagtccatcacatttattgagtgcctactatatgcctgacccctgacccctggctcagcatacctttgtttgtgcccagccacacaggaccccctgggagagcagcagcccatcctctgggcccccaaatgggtggattattccagcaaatacggctttggctaccagctcttggacggggggcgcacgggacggcacccacatggccctgcgaccccccggagggtaagttgtggcctcctgtgccctgggggaccaggcactccccctgccttttttcattcatctctcaagtatttattaagcacctactgtgcacacctacaggtgctccctgcctggtcggggagaacaacactaaacgaatcagcaagtgcgtttctgtagtaaatgaacccagtgaagaggcagattaggaggggaggtgaatctcagtagtgtgggtagggggaaggggaaggggtctctgagaaagtgacgtgaatgacaagcggcagccctgtgctttgggaggccaaggcaggattccttgagcccaggagatcgagatcagcctggacaacatagcaagaccccatccctacaaaaattttaataattagcttggtgtggtggcacacacctataatcctggcacgttggaggctgaggtgcggactcgcttgaacccagcagtttgagatcagccttggcctcatagcaagaccccatctccacaaaaaaattaaaaattagctgggcgtggtggtgcacaccggtaatcctggcactgtgggaggctgaggtgggagaatcacttgagcccagcagtttgagatcagcctgggccacacagcaagacctttctctacaaaattttcttctttttttttttttttttttgagatggagtctcactctgtcacccaggctggagtgcagtggcgcaatctcggctcactgcaagctccacctcccgggttcacaccattctcctgcctcagcctcctaagtagctgggattacaggtgcccgccaccactcctggctaattttgtatttttattagagacggggtttctccatgttggccaggcgggtctcgaactcctgacctcaggtgatccacccgcctcagcctcccaaagtgctgggattataggcatgagccaccgcgctcagccactcctggctaattttttgtatttttagtagagacggggtttcactgtgttagccaggatggtctcgatctcctgacctcgtgatctgcccgcctcggcctcccaaagtgctgggattacaggcgtgagccaccgcgcctggccaagtttttttttttttaaattagccaactgcaagggtatgcatcagtaggtcccagctacttggatggctgaggtgggaggatcacttggtcccaggaggtcaaggctccagtgagccatgattgcaccactgcgctccagcctgggtgacagaacgagactctgtctcttttttttgagacggagttgtgctcttgttgcccaggctggagtgcaatctcggctcagcgcaacctccccatcccgggatcggggtagctgggattacaggcacccgccaccacgcctggctaattttgaattttagtagagacggggtttctccatgttggccaggctggtctcgaactcccgacctcaggtgatcctcccacctggacctcccaaagtgctgggattataggtgtgagccaccgcgcccggccttaacacaatctttctagcgggagtgacatgggggccagtggggaggtggctggactcatcaggtgggcagtggcggaggcctgggctgtgctggtgaccggggagggatgagaggggctgcagtgtggatagagttggaaggcaggaagggtggaccagctgtcagctgaggtgaagagaggacagagagccgcactgggcatatggataaggtgtaactagggcagagctgctctttaaagccaccattccagggggtgtaggtcaatggaagggtgtccactggcctgggctgtccaggacagaggccctgtgtcctggccccagccaagtgtgctacatgcccaactgcgggaggctggaagccttcgccctgagggatgtgcccggcctgctgggcgccaagctggccgtgctgcagctctttgccggctgcctgcggcggcggctgcgggaggtgagagctggggtgctgggtgtgggggcgaggggtggggacgccccctgcgtcacgtgacctcagccgagtctgtccacaggaggggaccctccccacacctgtgccacctgctggacccggcctctgcctcctgcgcttcctggcctctgagcacgccctgctgctgctgttcagcaatgggatggtgcaggtgagcccggggctcaaactcggggcactggggctcggcagggtggggtctggcctgcctgggctgttacggagcaagctttgggggagccttaggaagcatttgcctcccaggaaaaaaaaaaaaaaaaaaggtattggctcctgcgtacaaaaccacagcatggaaaatgcatgacgtttttgggccaggcactgtggtccacacctctaatcccagtgctttgggaggccgaggcgggcagatcgcaaggtgaagagtttgagaccaacctgaccaacacggtgaaaccccatctctactaaaaatacaaaaattagctgggcgtggtggagccttcctgtaatcccagctactcaggaggctgaggcaggagaatcgcttgaacctggcaggcggaggttgcagtgagccgagatcacgccacagcactccagcctgggcgacagagcaagacttcgtctcaaaaaaaaaaaaaaaaaggccgggcacggtggctcacgcctgtaatcccagcactttgggaggccgaggtgggcagatcacgaggtcaggagatagagaccatcctgcctaacacggtgaaaccccgtctctactaaaaatacaaaaaaaaaaaaaaaaaattagccgggcgtggtggcgggcgcctgtagtcccagctactggggaggctgaggcaggagaatggcgtgaacccgggaggcggagcttgcagtgagccgagatcgcgccactgcactccagcctgggtgacagagcaggactctgtttaaaaaaaaaaaaaagtcagggtcttgctggaagactgtgggcaggggagcccccatctgagcctcagtttccccaggtgtacagtggagcacttggcctcccgaccccgagttcctgtggctggggcaggcactaggggccagactgggggctctgggtccagtgtccacttgtccttctggagcgccacggctggaggcaggtgcaggggtacccgtctccccttgactggtatcttaccctttgcaggtgagcttcagtggagtcccggcccaactggtgctgagtggcgagggtgagggtttgcagctcaccctctgggagcaggggtcccctggcacctcctactccctggacgtcccgcggagccacggctgcgcccccaccaccggacagcaccttcaccacgccctccgcatgctgcagagtatctagtgcccctgagggtcagagtggacccctgcatggtagtgccagggacccaggctccatttccattcctgtggctcccccagaggggctgtcctgggggagggctggggggcacacgggaggtgggttcttgccttgtggcatgactgttcaacccagactttgctgggatctcttcctttttcattaaagacaatttgaaatgctgtaggccatggtctgcctctctttgggggaaagcgtttgaggagctttggcaaagaaacgttgaccccacgtgacgttgcatcctccctgtttctcttagtggcagaggtgggttacattttcactaatgcagacattagcaccagaggccagtgtagtggctcatgcctggaatcccagcactttgggaggccaaggcaggaggatcgcttgggcccaggagtttgagaccagcctgggcaacatggcaagaccccatctctacaaaaaattagctgggcatggtggcacgtgcctgtagtcccagctacttgggaggctgagatgggaggatggcgtgagcatgggaggttgaggctgcagtgagctgtgattgcaccactgcactccagcctgggcgacagaacaaagaccctgtctcaacaacaacaaaagtagtaccagaagtggggttctgccataactccaaatctaaaacatgggacagttgcttaatgggtggacaggaaagaagccgacactgaggctggaaagatggctggctatgctccgggacacagttggcacaaccgtcacctgtgctgccctggggtggacggtgcactcatggacctgacctctctgggctgatggagcattggttgttagatcaaaatgtcataaaaggccaggcgtggtggctcacacctgtaatcccagcacttcgggaggccaaggcaggcagatcacttgagctcaggagttcgagaccagcctggccaatatggtgaaactccgtctctactaaaaatacaaaaattagctgggtgtggtggtagggggcctgtagtcccagttactcaggaggctgaggcaggagaatcacttgaacccaggaggcagaggttgcagtgagccgagattgcaccattgcactccagcctgggcaacagagcgaaaatccctctcaaaaaaaaaaaaaaaaaaaaaaactggacgcaacctaagtgtccagcggtgcgagactcaaacatctggccatcccctgggatgagtgaggctgggaaagtgggaaggctcacgggaggcattaaggcaggccgaggggtgcagagctgatgacggaaaaacccgtcaatcgcagaaggactccaggcccctcagtagctcttttgttttttttgagacagagtcttgctctgtcgcccaggctggagtgcagtggtgcgatctcagctcactgcaacctccgcctcacgggttcaatagattcctctgcctcagcctcctgagtagctgggattacaggcatgtgccaccacgtccggctaatttttgtatttttaatagagacagggtttcatttgtttgtttgtttgagacggagtctcactctgtcgcccaggctggagtgcagtggcacgatctcgactcactgcaacctccgcctcccgggttcacgccattctcccgcctcagcctcccgagtagctgggactacaggcgcccgccaccaagcccggctaatttttttttttattttttagtagagacggggtttcaccatgttagccaggatggtctcgatctcctgacctcgtgatccgcctgcctcggcctcccaaagtgctgggattacaggcgtgagccaccgtgcccagcctagagacagggtttcaccatgttggtcaggctgctcttgaactcctgacctcaggtgatcctcccacctcagcttcccaaagggctgggattacaggcatgagccactgtgcctggccccctcattagcacttgaggccacaattctcagtgcgaggctcctgggctgtgctttgggcgtctgctaaggtgctcagaggtgtatcctatgctggagaaaactccacctcgaccgatgcgggatcaggagaccggggctccagtcccagctggccacttccaggcacatccaggcctcagtttccctgcctgtttaaggggggcatgtattctctggaatccctgccagcagcatgattctgcatgaagttctacttccaagttccggttatcaaccccagaaactcatcataaaagagggagaagtggctcatgcctgtaattccagcaggctgggaaattgaggcaggcggatcacttgaggacaggagtctgagacctgcttgggcaacacaggaagactctgtctctactaaaaatttaaaagccaggcctggtggcacatgcccgtggtcccagctactcaggaggcccaggtgggaggattgcttgagcccaggagttcggaggtacagtgagctatgattgcaccacggtactccaccactactctgggtgatagagcaagaccctttctcaaaaaataaaaataaaaaattggctgggtgccgtggctcacgcctgtaatgccaccaatagacagatcacctgaggtcaggagttcgagaccagcctggccaacatggtgaaaccctgtctctactaaaaatacaaaaattagctgggcgtggtggtgagtggctgtaatcccagctacttgggaggctgaggcaagagaatcgcttgaacccaggagagagagtttgcagaaggcgccactgcactccagcctgggcgacaagagtgagacttcgtctaaaaaagaagaaaaaagagagacattcctggaggtgcgcacaaaagggcatcattgacatctggagtgcagtggcatgatctcggctcactgcaagctccgcctcctgggttcacgccattcttctgcctcagcctcccgaatagctgggactacaggcgcacgccaccgtgcccggctaattttttgtattcttaatagagacggggtttcaccgtgttagccaggatggtctggatctcctgacctgatccgtccgccttggcctcccaaagtgctgggattacaggcgtgagccaccacgcctggccaccttagcctctagaatagtagtagttctcggccgggcgctgtggctcatgcctgtaatgccagcactttgggaggccagcgtgggcggatcacgaggtcaggcgttcaagaccatcctggccaacatggtgaaaccccggctctactaaaaatacaaaaattagccaggcgtggtggtgtatgcctgtaatcccagctactcgggaggctgaggcaggagaatcacttgaaccggggagtcagaggttgcagtgagccaagattacaccactgcactctagcctggcgacagagagacactccgtctcaaacaaaaaaaaaaaaaaaaagaaagaatagtagttgttctcaatggtgggggggggggtgattctgtccccaggggacactgggctatgtctcgggacatctgtggtcataatgacagggagtgctcctggcatggagtgggtgaagggcagggacgccgctcagcaccctgcaatgcccaggacagccccaccccagagaatggcttggccccaacatccatagtgcccaagaggagagaccctagcttggacataggaactgaaatatttacaggcttagtgtttaattcctaaagcggatttcctctgtaatcagggaaaaaaaaaaaaaaaaaaaaaggaatgaagtggagaaacggcactcccgggagacgttgcacattcccaagcccacgctgcacctcacacgcagcggggagcaatgtccccgtagtggcccctcgtcaaggtcagtgatgcacggggcgagagaggggttgaggtggggatggcctcctgccaagcacaacgtgtcctggggccacccatctgcaggcagagcgctccaccactcaaatgggggcgtgatgagtccgaggccacccaggtctgaagcttcccaggggccctcctcacagccctttccctttggaaccatagtctatcaattctgaaagtaaaatgcagacttttcttttttttcttttcttttttttttttttgagacagggtctcactctgtagcccaggctggagtgcagcgatgccatcttgactcactgccccctgtgcctcccgggttcaagcgattctcctgactcagcctcccaagtagctgggattacaggcatgcgccaccacacccggctaacttttgtatttttagtagagatgaggtttcaccatattggtcaggctggtctcgaactcctgacctgtgagcctcccgccttggcctcccaaagtgctgggattacaggcgtgagccactgcacctggcctcctttctttttctttctttctttctttctttctttttttttttttttttttttgagacagagtctcactctgtcgcccaggctggagtgcagtggtgtgatctcaattcactgaaagctctgcctccggggttcaagcaactctcctgcctcagcctcctgaatagctgggactacaggcatgtgccaccatgcccagataatttttgcattttcagtagagacgggatttcaccatgttggccaggctggccttgaactcctgacctcgggcaatctgcccacctcaggctcccaaagtgctgggataacaggcatgagccaccgcgcctggcccatttcttttatttttatttatttatttttttttttgagatggagtctcactctctcgcccaggccggagtgcagtggccggatctcagctcactgcagcctccgcctcctgggttcaagcaattctcctgcctcggcctcctgagtagctgggactacaggcgtgtgccaccacacttggctaatttttgtatttttagtagagacggggttttaccatgttgcccaggctggtcttgaactcctgacctgaggcaatccacccgcctaggcctcccaaaatgctgggattacaggcgggagccactgcgcttggtctggatgccgtttctttgtcacaaaattgcaaccttaacaaatcaaactcaagtcccagggtccaccaccacctgtccctgggccccctctgtttctgggaagtgacagggtctcctctttttttcccatctgtttcctatgcttactttcctggagagaataactgacccatggcggcatccccgcgtcgcctctcggccgtgtgcctgtgtgtgttgctgcgtctgtggagatagagccaactctgtgctttttatggaacgggggatgaagcaaagccagcgtttgtggatgggagagaaaatacgaccaaaacagacactggggcccatgttgggagtagagagggctgcaggcacgctgggctggggtggggggaggaagcagggggacgggtcaggggaggtcgtgtgccttggtgtggccagacctaggaggagggatcagtggggagaatttggagatgcccccagggaccccaaaggaatggagtgtgggtgagagaggaacaaaagcaagcagagaaaacacagagcaagtgcatcactgcctttaaaaacaaaatgagccggccgggcgtggtggctcacgcctgcattcccagcactttgggaggctgaaatgggctgctcacctgaagtcaggagtttgagaccagcctggccaacatggtgaaaccccgtctctactaaaaatacaaaaattagccacctgtggtgatacacacatgtagtcccagctactcgggaggctgaggcaggagaatggcgtgaacccgggaggtggagcttgcagtgattgagtgattggagatcacgccattgcactccagcctgggcgacagagcgagtctccatctcaaaaaaaaaaaaaaaaaaagtttgttgttattgcaagacaccaagttgttgttgttgttcttcttcttcttctccttcttctctttcttcttcttcttttttttttttttgagacagtttctctctgtcgcccaggctggagtacagtggtgcaatctcagctgactgcaacctctgcctcccgggtgcaagcgattctcctgcctcccgagtagctgggattacaggcatgcaccaccatgcctggctaatttttgtatttttagtagagacggggtttcaccatgttggccaggctggtctcgaactcctcacctcaggtgatctgcccgactctgcccctcaaagcgctgggattacaggtgtgagccaccgcgctcggcctcttctctttttttatagagagaaggagtgtcgctccgtcacctaggctggactcaaactcctggtctcaagcaactcccccgtctcagcctcccaaagcactgggattactgtgagccaccgtacctggcccagacaccaaatgtgaaggtaacttgtgacccggcaatagctaactaatacacaacccaaaacatgcaagaaacagcttcatttctgcccggaacatttgtttccagggagaaaaagacaaaacatcttcagagtgtttaactgggtgtcttgcaaaatgacctacctagagtatttatttccatctgcttgtgggcgtcaagaacagcaacaatctgtgccgtctcccacgccccgagcccacaatggtggtttattaaaaataaaccaaccacagaatatattaattttctaacctcccgggccaattcttatttctaggtataagaacttccagagatggcaaagcacccacaccgccctcgtgctaaagtttctggaatcttccttagacgggtgaactgtgtgctgccagaaataaaattaatagcctcacttttttgggtgcttacaagggttggaacttcaagaaatggtcatgaattcactccagccctggctcaaagatttttttttctttcttcccttcttcttccttcttctccctactcccttctcttcctctttctcctcctccttccttctccttctttttctttttggaaaccactgatttaaccctgagagagggaaaacttgtcctggcaagaatttccaaagctcagttttattttttaagacaaagtctcgctcttgtcactcaggctggagtgcagtggcgtgctctcggctcactgcagcttccgactccctggttcaggagatttttctcgtgcctcaggatcccaagtagctggtactacaggcgtcatcatgcccggataaattttctacttttagtagagacggggtttcaccatgttggccaggctggtctcgaactcccgacctcaggggatccacccgcctcggcctcccaaagtgctggtattacaggcgtgagccccagcgcccggccccaaagttccgttttaccctttttcccacgctgaggctacagctgaacccagcctccagaccacctcctcattggtctatgggagcacgtgacatcatgcgtcctccaatcaccagcaagcaagcaaggcgtgggcgggaccaagggcggctacctctggggccagcaggattggctgttgcccgtggtaactgtgtgtgacgtcataaagcttccttgcaccttggcaaggccccgggagcagggaccttttctctcccactatacagatggggacactgaggcgctggttctcaatctatgaaaaaatggggtgctggtaggtaggtcaacctgggtcccacggggagttttcaaactcctgatgactccagagaattacgctgagtgaaaaaagcctgtcccggccgggcgcggtggcccacgcctgtaatccccgcacttaaggaggtcgaggcagccgggtcacaaggtcaagagatcgagaccagcctggccaacatggtgaaaccccatctctactaaaaatacaaaaattagccgggcgtggtggcgggcgcctgtagtcccagctactcggggagctgagggaggagaatcactttcaccacggaggcggaggttgcagtgagcctagatcacgccactgcactccagcctgggtgacagagtgagactccgtctcgggaaaaaaaaaaaaaaaaaaaaattagccgggcatagtggggtgtgcctgtggtcccagctactcagttggctgaggtgggaggatcacctgagcccaggagttccagaccaccctggggaacatagtgagaccccatctctataaaaaattagaaaattaaggccaggcgcggtggctcacgcctataatcccagcactttgggaggccgaggcgggcggatcaggaggtcaggagatcgagaccatcctggctaacacggtgaaaccctgtctctactaaaaatacaaaaaattagccgggcgtggtggcgggtgcctgtcgtcccagctactcgggaggctgaggcaggagaatggcgtgaacccggggagacggagcttgcagtgagccgagatggcgccaccgcaccccagcctgggcgacagagcaagactacgtctcaaaataaataaataaataaataaataaataagccaaggatgatgatgcacacctgtagtcctagctgcttgggcgactgaggcaggaggatgccttgaacccaggagttcatgtaggttgcagtgagctgtagttgcaccactggagtccagcctgggcaacagagcaagaccctgtgtaaagaacaaaaaaagtttatgtaacattttagaaatggaattagggttagggatgagggtgcggggagggtgcacaaacagcaagagatcctgatggtgatggaaatgctccatgtcatgatggtggatacacgaatctacccaggccagcaaattataggagactaaagacatctcacacactcacacacacgatcacaagttaaactgaggaatcctgagtaagattgatggattgtatccatgtgaaatcttacttatatgttttttagagatggagtgtccttaatgcaccccaggctggagtgcaattttgtgatctcagctcactgcagcctctggggttcaagcgattctcctgcctcagcctccggagtagctgggattacaggcgcccaccaccacgcccgactaatttttgtatttttagtagagatggggttccactatgttggccaggctgctgtcgaactcctgacctcgtgattcacctgccttggactctcaaagtgctgtgattacaggcgtgagccaccacacccgtttttgttttgttttgttttgttttgtttttgttttgagatggagtctcactctgttgcccaggcgagagtgcagtggtgtgttctaggctcagtgcaaccaccgcctcccaggttcaaacgagtctcctgcctcagcctcccgagtagctgggactacaggtgcccgccaccacgcccggctaattttttgttgttgttgtatttttggtaaagaggaggttccccatgttggccagcctggtctcgcactcctgacctcaggtgatccacctgccttggcctcccaaaatgctgggattacaggcatgagccacagcactcggcccttccctcctttctttctgagacagggtcttgttccgtcacccagactggagtgcagtagcaggatcacagctcaatgcaacctagaagaattc

SEQ ID NO: 5 - DNA, 153376 bp, Homo sapiens
gaattcttggatcggaacaagctcctggcgggtttcgggggatggagctgttccggtggggatgtggcttggccagtcccctttatggtggcccaggaggctgaccgacggccggtactcgagctccaccggggcagctgtgaggatccagcctcaaccccaagggactcaggaactagggagggggacaggaggggtctgggccgcaacagggaccctgctacgagaggggtaccctggccccagctcagagccccctctggacggtcagaacatggcaggaagctgcccaaagccctctgaggatggactgccgaggggtgtctgtgatgttcgccccacaggccaacctgggtgttgggctagggagtacccaggagaccctggagtcctggagcaggtcctgctgcttgataggagagggcagcccctctgtctccaggtaaatccccaggcagggccgggcgcggtggctcacgcctgtaatcccagcactttgggaggtcaaggcaggcgggtcaactgagcccgggagtttgagaccagcgtgtccaacggggcaaaacctcatctctacgagaaaattttaaaaatctgccgggcatggtggcgcgtacctgtggtcccagctactcaggaggctgaggcaggagaatcactagcccaggaggcagaggctgcagtgagccgagatcgcaccactgcacttccagcctgggcaacagagtgaaaccgtgttttaaaaataacaaaacaaaataaaataaaatgaaataaaataaaaataaatatatatatacacgtttatatatttttaatttaaaaatttttttttttctttttgagccacagtttcgctctgtcacccaggctggagtgcagtggtgcaatctctgctcactgcagcctctgcctcccaggttcaagcgattctcctgcctcagcctcccaagtagctgggattacagacacctgccaccacgccaggctaattttttgtatttttagtagagacagggtttcaccatgttggccaggctggtctcaaactcctgacctcaagtgatctgcccgccttggcctctgaaagtgctaggattacaggcgtgagccaccgtgccaggcctatttttcatttttttgagatggagtctcactcttgtcgcccaggctagagttcagtggcgccgtctccactcactgcagcctctgcctcctagatttaagcaattctcctgcctcagcctcccgagtagctgggattacaggcgtccgccaccacgcctggctaagtttggtatctttagcagaagcgaggtttcactatgttggccaggctggtcttgaactcgggacctcaggtgatctgcccacctccacctcccaaagtgctgggattacaagcacgagccacttggccagaaacatattttttaagtaattccctcactgacaggttcctacaagtaaagttgagccccccctacagctgacggcgaaggaactggaagctctgcagcagggagaatctcctcaaatgtgcttcttgaaaagctggggccatgagtagcctcccattcacatccccatggggacccttctccagggcccacgggggcgggtggagccgggctccgggccaggaaggtcaggtggagatcacgccgcgtccactggggcagcattccgcacgacgtgaccccgggcactcggagcggggcaagtgcccgtggaccccgtcgggtgggccggggccgggggtggggctcacctgcaggggcggcgggctgtacaggaggctgcccgccggcgggggttcatgctgcgggtaatccctgtccatggcgggccccactgcaagcatcgggcggcaggcggggtggggtcctcggccgggcagcaggcggcgggactccaggacccggggccgccggggcgtctatctgggcttctcgctccgtggtggcggcggtggcggcagcatcatgatctgcagagggagacggggacgtcctgagagtccaacggtggtggagagtggtgctccccggccgcctctccctcgggcatgaccggtcccagcctgggctgcagctcctgctacctcctgggccggaaccaaaaggcgctccttcccctccccactcacccccacccgccatcagcagtgccacccaactcctttgtgctgcccacagcgcctttcctggcctccccggccccaactacaacgattaaggtgggcccgacagggctgcccaggtcacagggcagccgtaggaccaggcacccagactgtgagcagtggagctgcaggctgactcccccacatctggctttgtcagcagccggtgtgagactgtggagggagagtccaacccgggcccggcacccaggggagcccaggggacactggacccagccctgtccctcagaggcagcaggggctccacagtgaggtctcccaaggaggggggtcaggggccacgcagagctggaagagcacccagacctcgtttcaggctaatcacacaccagcatccccactgagaacgttcctgggctacagagccgagccccacaccatcagacgccagggacagctcccacgtgccccgcggcctctggcacacggccagacgcccgccaggctgagcccccaccaggccctacctggcgagtgcagggacccaggctggcccgtggtggcagggaaagctttccaggcgtccgcccagcatgctcactgccgagggcggcaggaaggggaggcggcggccactcccggccaagccctggagtgaagaaatctccgggacttccagtaattgccgtccagccacacgcaggcacttgtgcaatcccgtgggggagaggcacgtctctgcccggcgctccagagacagtggccgggcaacaggggctgggggtcgggactcctgtcccagagaccagatggaggtggtcaggcacagtgggggtcaccctgccaggccgtcccaactgtccgcggcctctgcctgctccctgcagtcaggacgctacaacccactgccaccagagctgggacccttggcagcccttccagctgcccacggggacctgcgacacccttgccagaacggccctttaggggaagggacaggcccgctgggatctggggtcttggccaatccttgtcaaagattctgggtcaggcaggatcaaagcctggctccaccttctgagttgaataacctcagacacccaagctcctccaagcctcggtatgttcctctgggagacaggttctctgggtagagcctgggaccccccgaccccggccccgtgtgctggtggccacaaacagctctgctgggcccaaggcagctgctgataccggggtccccatccaggggcccaccagtgctagggggtggcccaccccctgccttggggctcagcagcccctcccctgcagggactcccctcagctcctgtcagcaccccttcctgctgcaggttccatctcacggcagccacagccccagagctacgctgaccttttccacactcagggcgctcctcagctctgaggccacacagtcctgagctgatgggcagcagggcccaggccccacggtggacggagcttggggagggggcaccttgggcagctctggggcgaccccatgaccgtcctcggggtacaccatagctgagggacccctccagcagcaggggccctgagctcgcctgtgtccgagtcccctaggccagcacggtgctcctggcagctcctccctccctacggtctctgagccccccacgtctgtggacgccccttccaggcggcaaccccaggaggctcaggggaccgggttcttcaaggggagggcttcacacatggcatgtgacctggagtccatgccttggggacctggcagggtgtggagacctggaccgggaggggatgggggcaggagaacaatgcggacaccaggcacaaccaaccaagagtcagggcccaaaaccaggaggcggaggcggaggcggatcctcacacacggctgcttggcagtctgggattcctcaagaggctaacgctggagtcaccacaccaccgagcaattccacaccacacagaaacgtggccatgcacgtccacagcagcaccactcacaacagccacccgaggaagcagcccagtgtccacggataggcgagtggaccagcatgtggcgtggcccatccacgtgccagaacacgacacagccatgaacagcagcgaggccgacctaggccacagcgcagacgcaccttgaggacgtcacgctctgtgagagacgccaggcacagatgtgtgtgatcccactactatgcactgtccaggacgggcccatccagagacagaaggggatgcgtgggtgccgggctggggcgaccctgcacccggggcccatttccaagtccccccacaacccaacacttcaggctgtgcccactcctgagaacgcccaccctctgcaatcccccaggacccgccactcctgagaacgcccaccctctgcaatccctcaggacccacagccctgcctttccgcccactgccagccccccatcgcctcccaccctgtcctcggccatatctcacaacccctgctgccccgatccccaggccctcccgcagcccccagcccctagccctgcctgcagactcggtcctgtccgagggcccacgcccccaagggctggctcccaccccatggtcctgagccctccggacccttcccccattgactccgccgccgtttcttgcagcagctgtgaccacgccatgtctctggggcatccagctgccccaatccccaggataaaccctagtgggacactgggtggggtcttggggcctgagaacaccccaacgcagcctctgccacgcagccccggagacgctctccccacgcggccccggagaccctctgccacgcagccccggagacgctctccccacgcggccccggagaccctctccccacgcggccccggtgacacggcccaccccgagcctcagagccacgggccagccaaacgtccagcgggcagcagagcgtgtcccctgcctggttttatttttgggcgcgagtcccatgactggagggatgcgtggtgtgggggttgggggggcgggggtcacacggttcccaccttgggagggggcccgcgctttatcagcacgctgacacccagaggggatgtggcttccttctgaaatcaggtcttcaagggagtcgttgtaaaagagaacgatgaaggtgctggtggcccagacaggacaaccactgggaaggcagaacctcagacaggaccaagatccgggagaatccgaggaaccgggtaactgtgtccgcctcccagctctctcctgagtccgggtaactgcgtccgcctcccagctctctctcttgagtccgggtaactgcatctgcctcccagctctctctcctgagtccggataactgtccgcctcccagctctctcctgagtccggataactgtccgcctcccagctctctcctgagtccggataactgtccgcctcccagctctctcctgagtctgggtaactgcatctgcctcccgtctctctctcctgagtccgggtaactgcggccgcctcccgcctctttcttctgagcctgctgaagtccccgtcttcctggctggacgccccagggtctcaccccacgctgtgcagcaacagctcagcctcctgatgttcagaactggccactgtgcggaccctccccctgggggtccctgagcacctgtcgtgtggagccccttcgcgcgctccgccctcagacccgagccgtctgcagatggggagctgtgtcctcggagcccggttctcctgccgtcctctcgccgagcagggttgtgacccccgcactttcggatgtggacacggaggcccctaggtggagccttgacgtgacccccagagccagactcagcagctcaggccacgctgtgcccacgttcgcgacggcaaagcggagaccctgagaagacactggccgcagagccataaccgagaccacgggaggacccagggcgcacggcacaccccagagcgctccgcccaggcccgggttctggtctcctggcacacccggcagcatctcaaggcctgcgccagcaaaggcggacatggaggtctgaggaggaggcggcgaggcccgggcgagcgggcgcgaccgtggtgatggagcccggcagaggccaccgcacagtccctggaggccgcattacctcagccgaggttctccgggcaggcacaaggcgctccctgcgtcccaggacctgaagatggcaaggagcaggcccccgggtgtcccgggaaccccgcacagagccacggccataagacagagcggacttgcggcctccggtgacctcacagccgtgatggcctcctgcagctgtgaccgccgccccacagccgcgaccccacctgcagccgtgaccccacctgcagccgcgaccccacctgcagccgtgaccccacttgcagctgcaaccgccgccccacggccgtgaccccacctgcacccgcgaccccacctgcagccatgaccccacctgcagccatgaccccacctgcggctgcaaccgccgccccacagccgtgaccccacctgcagctatgaccaccgcacactggcctccagatgggctcaagacagggcaatcaccctctacctggcgggcgcacaactcgcatcctaggaccgggtgcagggggcgggggctggcgatttcacaaggctcagctaatatggggcagagagccctgcaagctcaggcacctgggcaggccccaactcggccgccaggaccgtctggtggggaggacactgcaggccgtctcaggtcctgacccctgcagacagagcgcttcgtccctcaacatggagcccggggcaagggaggcctgaagggctggagccaagggagggtcagcccagtgagagaccttggggggacgggggtagcaagagggggtagcaagggacagttggggacagcaggggacagtggggggacagggggcagcaggggacagttggggacagcaggggacagtggggggacagcaggggacagtgggacagcgggggaagagcaggggacagtggagggacagcaggggacagtggggggcagtggggggacagcgggggatggtggggggacagcagggggacagtagggaaacagtgggggatagtgggggggcagcggcggatgggacagcggggggacagcaagggacggggtgacaacagggagacagcggggagatggggacagcggggggcagtgggggacagtgggggaacagcggggggacagtggggggaacaggagggacacattcaagacatccgtgaggttcccctactcctgggccaaggtgcctgcctgagaggacttcgccccccacagagctgggcagtggcagaggagggggccagggaagggaggtgggtgagggagaccccagagtgtccggcgctgcccctgcccacgccagtgctgctctctgcagccatcagcctccgggtgcccccgcctgccccgccacgcggccacattcccgcaccaccctctcacacgttccaccccaggggcagcacccgccctctggctgtgggtgctggtgggcagcttgcgcctggcacctgtttgtgatgggggaagctgccccggcagcgaggctgagggagcgggaagggctgggcctggcagaggaagagcagccgctcacccacatccctgcagcccggctggggcccagcaagccgctcacggtccccaggccctcatgggcagccccccacccactgggtacatccaacttcatgcaccaagagcccatgaagaaaccactcccacacccctgcccaggcctcggggggtctgcggggcggcctcacaggaggcccagtattacaatggcggccgcctggctgcagtgagtgcctggtggacacccccgaagggcagtggggagacccgggggaggacgcacagagggtggctacagaacagaggcagctggctggagccaccgggggtctcgtccctgcagccttcgcctcctgggttccagtgatttttgtggacccactgggggtctcggctcactgcagccttcgcctcctgggttccagtgatttttgtgcctcagcttctggagtaactgggatgacaggcacccgccaccacggcccggataatttgcgtattttagtagagaaggggtttcaccatgttgcccaggctggtctcgaactgccgatttcaggtgatccgcccgcctcggcctcccaaagtgctggaattacaggcgtgagccaccaggcccggcccgaatggaaatcattttcatagtaacatgaatctctgtaactcactagactgtggccagggaaacctgtgggcagctctgccaggaccacaagggggcatttgctctggacggcccctcccagggtgggcagggcccgaggacggaaagaaagggtggagggtcctgaggtgcttcccagaaagctcaggctgctcctccagccaggcacagccagaccgggagcactgggagctgggggtgggggtgccttcctgtctcaacacagctttacctcttgggcccgatgaagcgggtctcaggatgcccaggacccacattttaggaacggccacgtcatactacgctttctacctctcctcttgaaattttctaaaagttctcaagtctgctgccaaggttatcagaactgcgtagggagctgtgtgggtcacctgtgaggcccggagcctccctgacgcaggtggtgggtgtcatggctctgctgtcttgtgaaagagtcgtcagtcaggcggcagggccaggagggtgaaagccgatccactcccttccctggggagccgcgggggggggggggggggggttgggccaggcctgcggggaggagccgacatacagcttccccagcagccggccagacagacggacgtcctggcccaaggtgagcgggcacggccacagatggcgcctggggcctttgcaggcgccctcctggccccgaggctgtggggctcctttgtgggggacacagggctcagggaccactccacaccctagacgggagcagggatggggtcttttaaagttaaggttttattcttttttaaaataatacagccgggaacagtggctcacacctgtaatcccagcactttgggaggtcaaggtgggagaatcgcttgaggccaggagttcaagaccagcacgggtaacatagcaacaccttatctctacaaaaaaatttaaaaattagccgggtatggtgcatgcacctgtagtcccagctacccgggaggctgaggtgggaggactgcttgagcccaggagtttgaggctgcagtgagctatgatcatgccactgcactccagccggggtaacagagcaagaccctgtctcaaaaaaataaataaaacttaaaaaataaaataaaatgataaaaacaatggttacagatggttttcgaagaaaaaaaaaaacaacacaaatacagactcatagtatagtaggtggcccagctaggaaagccacgatcctaaaaacagcaacactaagtactgaggaactagcgcacagccacagacacaagtgtgccacgcccacacacacccgcacatgcatctcagcacacggccacagacacgagggtgtcacacccacacacccgcacacacatctcagcacacggccacagacacgagtgtgccacgcccacacacacctgtacaggcatcccagtgcacagccacagacacgagtgtgtcacacccacacacgcatctcagcgcacggccacagacacgagtgtgccatgtccacacccaaacacggatctcagcacacggccacagacacgagtgtgccacacacccacgcacccacacacgcatctcagcgcacggccacagacaagagtgtgccacacacccacgcacccgcacacgcatctcagcagacagccacagacacgagtgtgccacgcccacacacacctgtacaggcatcccagtgcacagccacagacacgagtgtgtcacacccacacacgcatctcagcacgcggccacagacacgagtgtgccacacccacacacacctgtacaggcatcccagtgcacagccacagacacgagtgtgtcacacccacacacgcatctcagcacacggccacagacacgagtgtgccacacacccacgcacccgcacacgcatctcggcacacggccacagacatgagtgtgccatgcccacacacacctgcacagacatccacacctgcacccacacatgaaccgacacacgcaccccacccacaaatgcacatagaccccaatggcacctgtgcctgcacgggcaccccacctgcacctgcacacacacccacctgcataggcacaacccccccacccccacgcgcaccccacctgcacctgcacacacacccacctgcataggcacaccctgccccacccccacatgcacctgcacacacactcacacctgccaccacacaatggggaaggtggcccatgccagcgtcaatatctagttggtaacattgttctctcattgtacaagaccttaccactgagggaaacacgtggggggaatctctttatatcacttcttaccataattgtatcacttcttaccatagccacaaatctgcaattatctcaaaagtaaaaactgtggttgggtgtggtggctcacgcctataatcccagcactttgggaggccaaggcaggcagatcacttgaggtcaggagttcaagaccagcctgagcaacgtggcgaaaccccgtctctactaaacacacacacacacaaatagccagtgtcgtggtgcacacctgtaatcccagctactcgggaggctgaggcaggagaatcgcttgaacccaggaggcggaggttgcagtgagccgagatcacgccactgcactccagcctgagcaacagagtgacactctgtctcaaaataaaataaaataaaataaaaattttaaaaagtgtgattcccagcatgaactgggaaaacatgttgggctcatggctctgctgcccgccaggccctccaccagctgtgggagaagccgcatcctcagctgccgcaaaccttcatgcaggaaaaggccagcctggcaaaccacaggcacgcgggtggcacccggccacacgggcggcagttctgaccctcatcccccgtgcagcccaaaagccaatcatgggggaggccccaggcttgggcccagacccagtcctccctccccgggctcgctgcctgctcagagcccagcccacccgtgaaaggaccagggcaccactggcccaggctgcgtccagggagcacggaccccgggtggacccccccttaccacaaggcgcagggccaggtctcccaagggcacctcgactggtgcacaatgaccaacatgccggacacctgcaccccaggggccccgaaagtggtgtgtgtgcgtcacactcacatgccaatgcctgcttctcaggaaccctgagagtgacgtgtgactgacacgccaatgcctgcgtctcaggatccctggagagccacgtgtgcgtcacgctgaccgacacactgatgcctgcatctcaggatcccagagcgccacgtgtgcgtgtttcctcccccagggccagctgggtcccccaccccttgccaagctgccagtccatgaatgaagaagctgtggaaccgtccatcttccctccgccctccacacccacctgcccacaagtccaggggtgtccacctaaaccgcagcccagcccgatggggccgcacttctgctccagctcggcagcagcttaaagacctcaggatgaagacccacagcccctggggccccagaccccgcctctcctccagagggtgccaccctccctctctatcctcagaaatgctgttgggaggccaggcatggtggctcacacctgtaatccaagcactttgggaggccaaggcgggtggatcactggaggtcaggagtttgagaccagcctggccaacatggcaaaaccccatttctactaaaaatacaaaaaattagccaggcatggtggtgcgcgcctgtaatcccagctactcaggaggctgagtcaggagaatcgcttgaacccgggagttggaggagacagtgagccaagatcctaccaccgcactccagcctgggcaacaagaacgaaaatcctcaaaaaaaaaaaaaaaaggggggggggggccagccgcggtggctcacgcctgtaatcccagcactttgggaggccaaggcgggtggatcacgaggtcaggagatcgagaccagcctggctaacacggtgaaaccccgtctctactaaaaaatacaaaaaattatccaggcgtggtggcgggtgcctgtagtcccagctactcgggaggccgaggcaggagaatggcgtgaacccgggaggcggcgcttgcagtgagccgagatcgggccactgcactccagcctgggtgaaagagcgagactccgtctcaaaaaaaaaaaaagaaacgctgttgggggcaggagcctggatctcaacccctgcaaggtggaaatctggcttcctctcacccatacgagcctgccagaggcaggaggctgacgccccggagggaccagctgacatcggccttgagggaccagacttctccaggccggcaaccttctcccagctttgtgaggtggagcccaacctccagaccaagagaggccttcctgaccttcaaccccatctccagagctccccagagctggtctagcccctcatctgacacacagagaaacggagaccaggaacctgacgctggtttccctagcccatgtgaggaccctgtagaccagctacatgcacacccagtccagccgccggacagcgttcagtgggaagagagcagaccatcgtccacccacattccagactccaactggcagaggggaggggacgttggggctgcagggccaccaatgtggacgggacagagccccagggacagcctgtgctggggacgtatgggggcaggatcagaccccacagtgcctgcgggccacaaggccaagacaggatctggtaagtgacgatttggaggctggtcctgaggtgcaagagggagtgccagggacagagagggcaccggggtgactacagtccctccagactcacatctacccgcacctgtgggtggggccttatttgcatacagggtctttgcacacgtggttggttacaatgaggatgctggagggggtggtctgtgtccctgttaacaactcatgtccttaagagaaaagaggaacgtggacacccacacatcgggagacggccgcatggagacggagcagaggctggagtgacgcggccgcagaccaagggcgcctggagccccggaagctgggaggggcaggaagggtcctcccctggagctactccttgacctcagcttcctgtggcctccaggacagggacaggctgctctaagccacccagtttgcagcactgctgcggccgccacgagaagctcgtccagggaggaggctgctccagccctgagccccacgcgactcccgtgagcacgaggactcgggtgccctggggtgaggcggcacgaggctgtctgtggatttccacagcatcccaggaggcgtctggaccgcagtggctccaggctgccaaccacgggcagaggccaccgctcccgagcttggaccctgccacgcgcaggcacaggccaggcggcgccggggaagcctgggggccccagaccggcccagcaccgcctgacatttctcaagcatgctgggggacggcccctcaatttaggatgaggacgaggtgggcccggcaggagggcaggagccggggtccagggcgagcaagttctccccgccccacgaggaacggcagtggccccggttgcctggaggtggaaggggcactgcagcctcaccgccccataccccaggagcccacgtgcttctctcacagggaaaggtgtactggccagactcagcgccctgaggacggggtcggaacccagcgcccaggaagctcccctccccccgaccaaggacctccctccaggtgggtcctctggaaactcaggcccgcggccatcacggcccctctcctgggagggctcaagggtgttggccgtgggggcttcacactgcaccccgatttcgagggaagcccctgcccatggcttccggggccttccggaggggccaaggggctggtgccatgggagggaaagttcccaagctcggagatggccaggagcaggaacagcttgagcgggtggccgaactgacagcttctcttgccaaacctcctgtcctgctccagcacaaagcctcccccgtgcacaggaacaggtgctaggacactgtggggacgtcccagatgccaggggcagtggagacaggaggaggaggaggaggaggaggaggaggaacaggaggaggaggaggaggaggaggaggagaaacaggtgctaggacactgtggggacgtcccagatgccaggggcagtggagacaggaggaggaggaggaggaacaggaggaggaggaggaggaggaggaggaacaggtgctaggacactgtggggtgtcccagatgccaggggcagtggagacaggaggaggaggaggaggaacaggaggaggaggaggaggaggaacaggaggaggaggaggaggaacaggaggaggaggaggaggaggaggaagaacaggaggaggaggaggaggaacaggaagaggaggaggaggaggaacaggtgctaggacactgtggggacatcccagatgccaggggcagtggagacaggaggaggaggaggaggagcaggaggaggaggaggagcaggaggaggaggaggaggagaaacaggtgctaggacactgtggggacgtcccagatgccggggcagtggagacaggaggaggaggaggaacaggaggaggaggaggaggaggaacaggaggaggaggaggaggaacagcaggaggaggaggcacaggaggaggaggaggaagcacaggaggaggaggaggaacaggaggaggaggaggaacaggaggaggaggaggaacaggaggaggaggaggaacaggaggaggaggaggaggaggcacaggaggaggaggaggaggcacaggaggaggaggaggaggaacaggaggaggaggaggaaacgaggaggaggaggaacaggtgctaggacactcgtggggacatcccagatgccaggggcagtggagacaggaggaggaggaggaggagcaggaggaggaggaggagcaggaggaggaggaggaggagaaacaggtgctaggacactgtggggacgtcccagatgccggggcagtggagacaggaggaggaggaggaacaggaggaggaggaggaggaacaggaggaggaggaagaacaggaggaggaggaggaagaggaagaacaggaggacgaggaggaggaggaacaggaggaggaggaggaggaacaggaggaggaggaggaacaggaggaggaggaggaacaggaggaggaggaggaacaggaggaggaggaggaacaggaggaggaggaggaacaggaggaggaggaggaggaacaggaggaggaggaggaacaggaggaggaggaggaacaggtgctaggacactgtggggacgtcccagatgccaggggcagtggagacaggaggaggaggaggaagaggaggagaaggaggaggaggaacaggaggaggaggaggagacggagacagcaggaggaggaggaagaggaggagaaggaggaggaggaacaggaggaggaggaggaggaacaggaggaggaggaggaataggaggaggaggaggaggaggaacaggaggaggaggaggaggaggaacaggaggaggaggaggaacaggaggaggaggaggaggaacaggaggaggaggaggaggaggaacaggaggaggaggaggaggaacagcaggaggaggaggcacaggaggaggaggaggaagcacaggaggaggaggaggaacaggaggaggaggaggaacaggaggaggaggaggaacaggaggaggaggaggaacaggaggaggaggaggaggaggcacaggaggaggaggaggaggcacaggaggaggaggaggaggaacaggaggaggaggaggaacaggaggaggaggaggaggaggcagcggcggcactgtgggtcttccacagggtgtgcccggaggaggtcaagactccactgccctgaagcaaacaaggcgtccagcccgagccagggtcacacgcccaacaggtaggatccagcaacccctgcgcagcagcccccgccatgcgagggaggacccggagttgagcgtggccctgcctgacatctgaccccgccgtcaggagctccaccaggtcagggctgctcagctgaccccacagccccaccaggcatggtcagcacggtgccgaatgcaggcctggaaagggaataaaggaggccctggggaggggccttggtgcttcatcccaagccaaccccgaaagtggaagccacagggccagggggacgtcgtggctgagatgcgagcagggtgccgggcacccccaaggcagcactgctgtccctgagaacagaaggaagtccaggcccagagtcagagccaagtggagtagtggtggttgctggcactcagtcccgtacccttggacagagcaagagtcccaagccaggaatgtgaggccgatgccttttaggaagaaaccacatctggggaaccagaccccagatcccagaacccagacctcagatcccagatcccagatctcagaccccagatcccagacttcagatccctagatcccagaccccagaccccagtacccagaccccagatctcagaccccagaccccagatctcagaccccagatctcagactccagaccccagatctcagaccccagaccccagatctcagaccccagatcccagaccccagaccccagatcccagaccccagatctcagacccccagaccccagatcccagatctcagaccccagatcccagaccccagaccccagatcccagacccgagattccagaccccagatcccagacttcagatccccagatcccagaccccagcccagagggaggcccggtgagggagtggaaaggagattccacgacacaaatgcttatgcggaaacagcctccaggccgggctgcggggctccaaagcagggtccccatgctccgagcgggcctcactgctacctggcggttaaaggcctgtccgcctggacagggtggtgcggctttctgtggcagccaagcagcttccacgcggcttctgctgctgtgaggagcccgctcgggtcttgtgtttattttcagtcttttggggccagtgcggtggcccgtggctgtaatcccagtgctgggaggactgcgtgagcccaggaggtggagaccagcctgggcaacagagcgagaccgcaactgcacgcgcacacacacacacacacacacacacacacacacgctaaaagccacacacgctaaaaaccttttaacatgctgagcttgagcctgtggtcccctctaacctacacgtctttttctcctgagcagacgttaagctaaatccccactcactccagacttccggtcctttgaaatggaggtgcccttgtgtgtcttcaatccatgtggagggtagtctggcccatcccacacctgctactgtcactgcctcacatcagcggcctcaggccacaaggtctccccacctggctccttggggagtgccaagcgttgccagcagccgggctatgctgatcccagacaagtggctcgaccggtcaccactgtccttgagcttaagtccagccttggtgacaaaaatgtcacaaggacctgcatccgagccctgagggcatcaggtcctggaggaggaggaagagtcccttctggcttcgggctgggcttgaggacggcagctccaagaccgcttagagcgagacttcagcgctgactgctggagctacgcaccctgtcctgacaatggccgcacagttaggcgctgctccacgcctggaggagggaactgagggcccgaaatcacagaagcaggaactccaggttcgccagtgcggcctgatccaccttccctcaaacgtagctgctgacaacgacacccacgcgccctctctgggcccagcaggtcagaggtccaggtgggctggctgctccacggccacggctccaaggccaaggtcaaggcactgctgtcctgggccctggtctgggttctccgggagagtccgcgcctgagctcggccgggggcgggattctgctccctgtggccactgggctgaggccccacttccctgctttcggggagccacgtcccccatcacgccatccctccctcctaaaagccagcagggcaaggtccctcttaggcttctgacctgacctcccctcctccagctggagaagggtcccacgcatgaggacatttgtgacgatgccgggacccgaggaatccaggacgacccctctgcagagcccctgtgccccgggaggcaccacacccacggctccagggggtgggggggacggtggcttctctggggctgacccagacctgcagtacacagcgccaggccatgaggtctcagcctgcggtcaggccgcgtgcacggaaacccaggctcctgaacggccagccaggagcaaagccggccactgagtacgggagcaggctccggggacacgctcccactccttttaggggcccagaggctgtggatgaggagctcgagtatccccctctcagtgtaacctccccacccctcccacatcctccaagtggggcaggagccgcctcaccagagctgggggagggggccacacaggtgcacccctggggaggggcagcggagacttgtgggcaggaatgtggccagggtttctagatcatctggtttttcaagagaagccacaagtctgcgtttgagggtggcagcccctggtgttccaaagtcggcaagcaattcaagcatccacacccccaccccggggcagcgttgggtgcccagacctcagggccaccccgagagctcctgcatccacctgggggctcgcagctcccccaagctcctggcgggtagcagtcattccaggatctgataaaagcccccgaaaatgccccggtcagcccagccacacccgggcaacaccgacagccattctccaccagggccccagcgcccagctgagtgagacccacccggtagcttccggggctgggcccctgccccaccagtgaaaacattctggtcacagtgatgccgccctgagaagctcctcaccgtcccccgtggccttggaacccccctcacacccatgggttccaggcaccctggcggctgtctgtccccacgaagcctggccctctcacagcgtagggaggctgcggtcaccagcgtgggtcccgcgacccattccacccggcccctgggcaccggaagccaggcggcgagcgcagcagaccccagaggcagctttcctcagtttacctgacatgcaaaggaagacgcctcctcactccaggctggacgggcagccgacggcggtccggggccatggcgggcagggactttctccgtgaccctccctggctgcccctccccagcaagtgagtcagttccagaaacgtttactgcccgccaggcccgaaggctcaccggctccccctccccacgccccagcacccagggccttggccccaggagcccacagcggcagagactcccaggaaacgcgagtgagccgccttccggaacctggcgcacatcactttcaaaacgcagcggggcctggaaccaaggccaaggccgcctctttcggtttcacttggacgcttgttcttgctggggatggaggtcaatcacaaggctccgggaagcacgggcacgagtcacaaagcaggtcactgagacagcggcaccaggcccgccagtccgatctgctgaccccagccagggcccagcactcccatgccctgcactgcacgaggctgcccgggacagtgcctgcaggggagatgactcggcaatgactctctgggcccctcctcccaccccatcactcatggggttgtccagggcaagaggcccaggggaatccgcaggagagccagggcacagggcacgagtgcggccccaggctgaggcctccgtgggactgagcttcagggccacgctgccatgctgagctctcacggggcctccgcctggaccaccaggcaccctcaggctgactggcccctgtgtgccacccatgtggcccaaggcctgtccccctcatgccaagagccccgtagggccccttcgagtagaatgcagcattccctgcccctccgaagcagtgagtggttcaggggcagagctgggcctgggcgaggggcccccggggggtggggtgatgccatcactgttgccgtcctacgggttgagacaggacagctgcccatcaccccttgatgcaagctggctgcaggctgcctgaccagttcccggggacaccgtgctcaaccctgtggtgacaactggggattccgaaggacagggaggtcttactttctgttaaacacttttattttccctgagatacaatccacaccaggaggggcacctgtccggagcatatgactcaacggtttcaacgtattctaaggcagaccaccacagcttctaattccaaaacattccgctcccccaaaacacagccgtgtccccaacagcagtcactcccccgcctctacagcccctgcaaccacacgcccacttctcttctgtggactggcctgctctggacacgtgaccacacgtctaccccccatctgtggactgccctgctctgcacacgtcacatgaacggagtcacgtgccgtggccttttgcgtctggcgtctctccgcaagcacgtctccgcagagcatccatgccgggcgcacagacgacagatctaatctccgcctcctcacggggcccaggaggcccagggcgagagctgatggggcccacgcatccgaaatccccgtcttggccagaaccccaggtttgccttcgcccgcagggctgagccctctcctgagtcctgggccctgtgacgggtgaccacacctcccagcagggaggcaaggtgaccacggggctggcagtctgctcttcgtcccagcccgagggtgcaggtgccggccaacctcccgggggttgggggcgagagtgcagaggcgaggggcaaggctgagagtccacccacactgccgggcggacagcgggcaggccaggacgagaaccaggttggggtgacctcgcttttaggcttcaacccggcagctggacacacccagccctccccgtgtgctgtctgaccacacagccctcggctgtggaaaaagtgactggaggtattccaggcctgcccgcaacaaatcacacacacatgcacacagggacaggccacacacgtgcacacaacacacgcacacatacaaaacacacgtgcacaagacatgcacaagcaggggtgcatgagaacacgcagcacgcacacaacacacacaacggacacgtgcataacggacacaggtgcacaggcaacatgcgggcacacacaacatgcacacaaagtacacgtttgcatgagcacgggtgcaaaggtcatacacatgcacccacaacacaaacacacacaaaatacatgtgtgagcaacacacgcaagcatgggcacatgggcacaggcaacacacacatgagcacacacacaaaatacacacaaccaccaaaatacacacacacaacatacgaggacaggcacacaggcacgggcaacacacaaaatacagacacacataaccgactcatgaacatgggtacacacaggcacacacacaacacaaacacgggtgcacaggcacacacaacacacaaacacggatgcacagacacgcacacaatgtgcacccataaaacacacgcgtatgaaacacacgagcaacacacacatgcacaggagcacacagccacaggcacgcacattcacacacacacaacgcacccacatccgtacaacacacacacagaacgcgcacacgtccgtacgacgcacacacagaatgcacgtgcgtacgtacaatgcacacaaagaatacacacatccatacaacacacaggcacacaacacacatgtgcatgcacatggcgcaacatacagatacacaaagacacgtgtacacacacatgcagagtccccagggcagcgctggcgtcatggggggctgcctccacaccgcctccaggagtgtttacagctgtggattacatgataccgcccccttcccagagctgatcccaccccccagcatgggggccccctgggagggggcctctgggagccggactggttctgtcgacacagtcgcctctttgttcggggcagagctcactctggcggtgttggcgtttccgcatgggccctgccggaggggcatccgtgactccgctggagccgggttgggccaagcccaagctggtcacacccctcacacccctggggttgggggaggccttaggcagcaagtgggtggggggtctaggggtggctggcgcaacctctctccacctcggtttccccgccaggtgagagggcagtgactgcccatggtcacgcggctggagaacatgcaccctctcctccgcacctgcacacctgggtgcctcctgtctagcccagactccaaagccaaccaagagtgaatggatgaacggagaggccagaccccaaagcaaactgagagtgaatggatgagggaagctcctgctgcctcttctgtgctctgacaggctccctccccctgaagtccagcccctgcctgcacagccccctccacaccagggccctcctggctcctggcaggtgtgggcagatgtctgccgggatcctcagagttaaacaaaagcctcctccctgtgctctgaaatcacactccaggggctggcaggcgccttccaagtccttccctctccaaggacgagagcctgcctgcgtctcctctgccgtctcccctgccgtgggaggccctgaggcccccatcctgctgttctccatcccacccaccaaggggtccagatctcaaattcgccctttctcggcaagaactctgaaggtggcccggagcaggccactgtgagaagccatcaccccacgaccagggtcacccctgggaaaatctggggccgggcagccagatccctgaaggccagaggatgtctgggaagaaagggcgtggacggcacctgctgggcctgccacaaactctctgggtcccatgtccccgctgctcctcttccagggccgagtcagggagagacatcccagggagggcacccgaaacagcacagcacccctcagtcaggaagcagtgccggctgccctggcccggaggaagaggcctggaagaaagtttgaagcctgtaatccccgtgtaatcgggctggctgcccacggggtctgcggccctgggtcctcggcccctcccatgctcttctcttgaacctcggcttcctctgcccctctgtaaaacactcactgcaaccgccccccccgccccggcaaactggcagccagcatcagcacaggccagctccgaggccgggcactctcgctgacagggcgtgcaacagatggcaccaaacctatcccgtcccgtcccagcagtcacaggcaggaaggacgttctgagcaggcgggaacaacaggcattccgggaagaagcagccaggggaggccccggctacacatttaagagattttttttttttttttttaacttttcagaatgttaatcagttcatccagggagacacccaccgtccctgccccagcaccatccgtgcccggcgtccctggaggcgctgggtgggctctccacaacgcctgccccccacgccccaggtcagtctggggattggtccctccaggccccacctgccttattcttcgggactctggggtggtgggaagagtgccctacgggggacaggacccaccaggaggcctgcgcttccccttcaccgacacacgctgctcccgggccccactcgggccatctcagcccgctaccctccctcccgcctgtccctggaagccgggtttgaatgcgacccgcactcccacccccaacacgctctgcagactccgcccagacggccccggggtcacctaatatcagcaagcccccatcccaaaccgggggacctccatgcagaaaccgaaaaaccatctgccccagaagagaagtcggaggccccaggagcgggaggggcggggagcaaggggagggagggagacagggctgcgctgcggggccgagaaggcaagggtcctgggaccggggacaaggaggaggaaggggcacgaacgcccgaggagcctggagtcaggaatcggggcggcgggagagaccgggggtcactcccaggaaggggtcgaggtcacgaggcgcatggagtcgagagtccccaaaagggaaggccaggataccgaggaaaagcgggtgcggggtcaccaaggggctcgggggcaccgatgagtgcggggtcaagggttaccagaaaacgaaaggtcgggggtcaccaagctgcgcggtacagggagtcacccggaagagcgggaaggaaaggttgggagggttgtcgtggaaggtagggttaaggttcacggcagggggtcgccggggggcgggggggcaggtcaaggttcacggcggtggtcgcggggcagcgcggggtcaacgttggcggcgaagggcggggtcggaaggggtcgcggcggagggcgggggtcccgccgcgctcgcccccgccccacggcccccagaacccccagccccgggcgcaggggtccgcggggagcgccggacccacaagcggggtcgggccaggcaggggtcgcggtggagccggggcgggggtcgcaaccagagcctcacctcgggcccgggtccggccgggcgcggagcccgcggcgcctgtttctccgagcctcgcagctgccgccgctcacttccgggtttcgggcgccatcttgggggccccgcgcacttccggtcatgccgcggggcggggcctccacctgcgggggcgtggtctcggttcgggggcggggccaccttccaagccaatcccttgaggtccttccgctattcggaaggggctgggactcctacggctctgggttcgaatcccgccctgcctggttctcttgagaccccagcatgtgctttcacctcctcaagcctcagtttcctcttctgcaccgtgctggtgaaatggaatctgctttgtggtacagcatccccttttttcctccttcctcagaaccccctccaagcctctgcatgtgccacgtcccccactggggctcactcacccgagacttttaaactgagactccctcaaaagctactaagacgatcaccagccgggcgcagtggctcacgcctgtaatcgcagcactttgagaggctgaggcggatggatcacttgaggtcgggagtttgaggccaacctggacaatatgatgaaaccccgtctctactaaatatacaaaaattagctgggcgtgatggcgggcacctgtaatcccagctactcaggaggctgaggcagtagtatcgcttgaacctgggaggtagttattgcagtgagctgagatcgcaccactgcactccagcccgggcaacagagtgagactccatctcaaaaataaataaataaataacgaaataaaataaaatgaaataaaatcatcacctctgggcctgtcagacatactctctcacgaaaagttatctctgttcattaatctctctccctaaccaaatacagttctggacgcttcagcatggtgactggcacatgggggtttgggtaagtcccaggggctacccccaagagagcaggatcctttcaggcagggccacgggggcctgaggggctcctcctctcggtggctgtggtgggaggctgccctgcgtggggagctggagtctcagggcacttttcctgtgacttgagccagtgaaggcagatccagtgtgggaggcaccaccgcctccccagcccaatttcagccatgacaatactgatacagctccctggacccaagcagccacaagccagaggcctctgcccccattccaaccccctgaaactagagttgatttctccatgactttgttaattcattcagtgacttctaatcgatgctgctctgtgcttggtcatgagctgggaaaacccagggtctcacagaggactcagctgtctgtcccaacatcagaaagcccctggtctaggggagagagaaccaggaccagacactccaatatgcgggatctctgggagggttgaaatgtctgcctagggcttcatagagggctgcatgctgaagagtgtgttgaagctggggttttgaagttcaagtaggagtgtaccaggtagacaagagtaggaagaacagtccgggcaaagaaggcctggtaaggcagataataagcaggtttaagatattttagcacctctctaaaaaactgaggccaaaagccaggcacggtggctcacgcctgtaatcccagcactacgggagtctgaggcaggaggaacacctgaggtcagcggtttgagaccagcctggccaacatggtgaaaccccatctctactaaaagtacaaaaaagttagctgggcatggtggtgcctgcctgtattcccagctactagggaggctgaggcaggagaatcgcttgaacccaggaggtagaggttgcagtgagctgagatcacaccactgcactccagcctgggcgatagagtgaggttcggtctcaaaaaaacaaacaaacaaaaaacggtggctcacgcctgtaatcccaacactttgggaggctgaggtgggtgaatcacctaggtcagaagttcaacaccagcctgacgaacatggtgaaaccctgtctctactaaaaatacaaaaattagccaggcgtggtagtgggtgcctgtaatcctgactactcaggaggctgaggcaggagaatcacttgaatctgggaggcggaggttgcagtgagctgagatcgcgccattgcactccagcctgggtgacatgacaagaccccgtctaaaaaaaaaaaaaaaaaaaaaatttcaggccaaggacccctgtcatcaaacccaaaagcacaagggggcagatggggaaactcagacccagaaggcagaagtgatatgtccagagtgagatgcagaaggcgcacaaggacattttgtccttcagctcattgggggtctcctttacccatggtgacagaacggcgtccacctgttgtgagcttttcctcagagtcccgcagagcagccggacccgacagagatacttccctccacactgaatctcttttttttttttttttttttgggacggagtctggctctgtcgcccaggctggagtgcagtggcgcaatctcagctcactgcaagctccacctcccaggttcatgccattctcctgcctcagcctcctgagtagctgggactgcaggcgcccgccaccaccccggctaattttttgtatttttagtagagacggggtttcaccgtgttagccaggatggtctcgatctcctgacctcgtgatccgcccgcctcggccacccaaagtgctgggattacgggcgtgagccaacgcacccggccaaatctccttttttttgagatggagtcttgctgtgtctcccaggccggagtgcaatggcatgacctctgcctcccggttttggcaaactgggtgctcatctcaactttgagactattttctcttttttttgagatggagtttcactcctgttgcccaggctggagtgcattggcgcaatcttggcccactgcaacctcctcctcccctgttcaagtggttatcctgcctcagcctgccaagtagctgggattacaggcatgtgccaccatgcccagctaattttgtattttccgtagaaatagggtttctccatgttggtcaggctggtctcaaactcctgacctcaggtgatctgcctgcctcggcctcccaaagtgctgggattacaggcatgagccaccgtgcctggctgagactcttttcacagcaaattgaacagcagttaaattgagcaataggcactaaagatttggaagggtgaggaagccagcctggggactggagggtggcggctgcatctgctcatttcctcccacactggaccatccacacaacttttgaggatcagtggaaatgaaaacacggtgccccggcacaaaacatatttcatagcttgggttaggcaacagcaaagcatcacgctgagcgccgggaccttctgagtgcaggcggtgggcgaagccccgagtcacacacacccacgacgccggccctgctcccacagcggccctctggggtagcgactggtattacctgcatttcacgagggaggaaactgaggcacgaactgttcagaagctgccctgaggtcaccaagtgagctaggaagaggcgtgggctcgatctctgccacatccacctcgggaaaccacaaggtctcgatgggtgattttgcctaaagtgggggcagtttgcccaggccggggtgggtccagccatctcagcaggcaggaatctgccaagttgggggatgcttagggaattagtcagatgcggggatttccagggaatcacagggggtggctccggaaagcagcagggacacagtactggggctcatggcccagcctggagtacagtgctgtgaatctgctgtgtgacccaaggagagttacttaacctctctgtgccccggttttcccacctataaaatggggagggtgataataatagcaactagtggccgggcacggtggcttatacctgtaatcccagcactttgggaggctgagacgggaagatcacgaggtcaagagattgagaccatcctggataacatggtgaaaccctgtctctactaaaaatacaaaaataagccggacatgatggtacgtacctgtggtcccaaccactccggaggctgaggcaggagaatcgcttgaacccgggaggcggaggttgcaatgagctgagatcgcaccactgcactccagcctgggcaacagagcaagactctgtctcaaaaaaaataataataatgataataataataatagcaactagctgctaggttgttcagacaactcaatggacagacagtgcctaatagaatttaaccactacgaatatttccaaatgaaattctttttttttttttttttgagacgaagtctggccctttcacccaggctggagtgcaggggcatgagctcaacttagtgcaacccctgcctcttgggtccaagtgattatcttgcctcagcctcccaagtagctgggattacaggcacgtgccaccatgcccggctaatttttgtattttcagtagaggcagggtttcaccatgttgaccaggatggtctcgagctcttgacctcgtgatccgcctgccttggcctcccatattgctgggattccaggcttgagccaccctagggaaattcttgattttcctcggcccagtccatggcgtcactgaagtggatgttcaatgagaaaataataaggatgaatgctgcagttggagttcaagagaggaggcatttttgacgccacagatgggcagagatggggtgagggccctggccggcaccagctctcctggctcagactttggaagccgccccccaggggagacgctcaactggtcagaggtgtggatagccccgtcccccagtagtcccaccccgcagagagctctcaggcttccagctctggcccaggcccaggtcctcggtgccatgtgaagggtggagagctctcctgggggacagagttgtacatttgtggaggttttctggtggggctgtgtttgacgtcaacactctcctccctaaaccctccctcttccccatcccatacaggtcctcctaaatgtcttcccagccccttcgagagaattgtggaagtggggttgccagatcaaacacaagacacccagttaaaattcaactgtaggtacgtgacgagtactttttgttgctgctgctgttgttgttcttgttgtttttgagacggagtctcgctccgttgacaagaaggctggagtgcagtggcgcgatcttggctcactgcaacctccacctcccgggttcaagtaattctctgcctcagcctcccgagtagctgggactacaggcacccgccgccacacccggctaattttttgtatttttagtagagacggggttccaccatcctggccaggctggtcttgaactcctgacctcgtgatccacctgcctcagcctcccaaagtgccaggattacaggcgtgagccactgcgcccaggctttgttgttgtttgagactgggaatcaccctgtcgcccaggctggagtgcagtggtatagtcacagcccactgcagcctctgcctgctgcgctcaagcaatcctccccagtcagcctcctaagtagctgggactacaggtatgcaccaccatgcctggccaatttttttactttttatagagacggggtttcaccattttacccagattagtcttgaactcctgagctcaagcagtcctcccaccttggcctcccaaagtgctgggattacaggcatgagccatcacacctggcccatttctttctttctttctttctttctttctttctttctttctttctttctttctttctttctttctctctttctttctctctctctctctatttccttctttctttctttctctctctctctctttctttctctctctctttctttcttttttttgtagagatggggtcttactgtgtcgcccagcctggtctcaaactcctggcctcaagcaatccacctgcctcggcctcccaaaatgctaggattacaggcatgagccactctgtccagcctgtcttaattatttcaaattgcagaaaacttcagacaaacatgaaggttgtttgtaaggaccttcttgggctgtgcctcagtttccccatctgggagatgccagcctggattcccctcccggcctcagtgtctctcctgggcggcaagaaggaccctgggactgtgcccactctgccgtccagggggccgagggaggtgcccagggagggggaggtgcgtggtggtgacgggcggctcccgcacagagcctcagacctgggcaggtgaggcaggcaggtgggtctggcccggcgcggcccgatgcgggggcagggatgggatggagccacttcctgtttctccacattctggaaagtccctgtgttcccaggcagagggggcacctcctccctgccagccctcctgggcgccgggctcctcaccacttctccttcctccacccacttccccagcggacgggcctgggacccgccccttcccctcctgcctctctcctcttttctttcccaatcaggcccttcctggtgtgcagaagggaaagctgattccacagcagctgggcctgcccgacccaggaggctacatctgtcacccctctgtctgtctctgtctctgtctctatctgtctctctgtctctctctgtctctttctctgtctccttgtctgtctgtctctctgtctccatgtctctctgtctctctgtcttcgtctctctgtttctggctctctttgtctctctgtgtctcagtttatttctgtctctttctgtgtctctttgtctgtgtctctgtgtccctctgtctctgtttctctggctctggctctgtgtccctgtctgtttcttttttttttttttttttttttttttgagagagtctcgctctgtcccccaggctggggtgcaatggcgcgatctcggctcactgcaagctccgcctcccgggttcacgccattctcctgcctcagcctcccaagtagctgggagtacaggtgcccgccaccacgcccggctaatttttttttttgcattttttagtagggacggggtttcaccgtgttagccaggatggtctcgatctcctgacctcgtgatccgcccgcctcagcctcccaaagtgctgggattacaggcgtgagccaccgctcccggcctgtctctctgtttctctgtctctctctttgtctctgtctctctgtctctgtctctgtgtccctctgtctctctgtttgtctctctctgtgtctgtctctgtctccgtgtctctctgtctctgtctttgtctccctgtctctgtctctggatccctctgtctgtttctctagctctctctttgtctctgtctctgtttctctatctctgtctatctctgtctcagtcccttcttttgccaccatccccctcccgtggccgccctcacgtgtcagcaccataccctccctgtggtcagggccacctgctccagggtgtcctcaggtcggtgctggccggcgtgttcccgggccctgcagccacctgcttgaccagggccaggcccagagtgagatcctaccaggccaggtcggggcagcctctgtgccaagacaactttagggaacaacaaacctgtctgacgggtttgagattccacatgggacaggctttctcacctccgcactgacgctaggacagctgggttgaaggggcccagtgacacccctgacatagcacctcaggctgggtacaggctgcagcagcctagtctgggtcagggctgtgtcctgaggttggggcacccagggcaggctgggtgaaggaagatcagcaatctgccggtcgccctgtgcagggaggataaacagggagaaggcactgcacatgcaaagtctcagcggggacaaagactcaggggagagtgtgcggggcctggggtgtgaggatagatggactgggagagagagaggggaccctggagggcctggaagctagacgtggcctgtattctgggggcactagggaaccattgagggttctggagcaacggagtggtacagtcatggtggggctagcggtgtactggatggggtgaggcacagggaccgaatttcagatcagaaggctcatctggtagtcagactgaggccggaggaggctcaactgccccgaggatgaagaaaggagccaaacttggccgggtgcagtggctcacgcctgtcatcccagcactttgggaggccaaggcaggtggactgcctgaggtcaggagtttgagaccaacctgccaacacggtgaaaccccgtctctactgaatatacaaaaaaattagctgggggtggtggcgggcgcctataatcccagctactcggcaggctgaggcaagggaattgcttgaagcagggaggcggaggttgcagtgagccgagatcgcaccactgcactccaccctgggtgacagagagagcaagattctgtctcaaaaaaaaaagagccaaactttgaacttcttttttctttctttcttttttttttctattttgagacagggttttgctctgtcgcccaggctggagtgcagtggtgtgatctcggctcacagaacccttgaactccttgcctggagcaatcctccctcctcagcctccagagtagctgggatgacaggcgcaccactatgcctggttaattttaaattttgttggccaggcgcgatggctcatgcctgtaatcccagcactttgggagaccaaggcgggtgagtcacctgagatcaggagttcgagaccagcctcaccaacgtggtgaaaccctttctctactaaaaaaaaaaaacaaaaacaaaattagccaggcatggtggcacgcacccataatcccagctactcgggaggctgatgcaggagaatcgcttgaacccaggaggcggaggttgcggtgagccgggatcgcaccactgcactccagtctgggcgaaagagcgagactccgtctcgacaaacaaacaaacaaacaaacaataaataaataaataaaccttgtttgtagtgaagaggtctcactgggttacccaggctaatcttgaactcctggcttcaagtgagcttcccacctcggtctcccaaagtgctgagatgacaggtgtgagccgctgcacccggcctgaacttcctatcaggtgctcattatgagccaggattgagctacagaaaatgcgagggaggggagacggcccccaggatgcccccaaaccggtactctgcaccccctgggcccacatctaaggacgacaaggcagaggcctcaaatgccaggtcctgtggctttgtccccggggcggtggggagccacgggcagaagtagggcaccagaggagattgctctgccagggctggggccagagcaaagggccgggggcagggcaggggcgttggatcgttggatggggctgcaaggtggggagggcaggttggggccatgtattcatccgagatgaatttctcagtgccacccagggccaggccccacttgcaggtgccagggccactacagagaacagacacaccctgagggggtccccaggccacgaagaagccggatgctggagcagcctaggacacagacaccttggcccttcccaggcaggcccctgccacgtgagtgcagggcaagggtcccaggagggggaacgggctccaggccccaccatggctgccctgagtgtacgcagtggtcagcccagtgctgatgtcacctgtgtggggacttcctggaccttcacctcggatccgctgcccggccccgagggaaattccagagaagccagggccgctcctggctgactcattctaggtgccagtagcacgggaggggctgggcaatggagggcctgggggcatttggagaactgtgaggagtctgaccacctcctctgagggccagtttctgctgcgtcccacggggacttggggaaaacttggactccccagccccagccctggcatcattttttttttttttttgagacagagtttcactcttgttgcccaggcatgggtgcagtggtgcgatttcggctcactgcaacctcagcttcccgggttcaagtgattctgtcgcctcagcctccccagtagctgggattacaggcgcctgccaccgcgcccggctaaattttgtatttttagtacagacagggtttcgccatgttggccaggctggtcttgaactcctgacctcaggtgatccacccgcctcagcctcccaaagtgctgggatgacaggcgtgagccacagtgctcagcccaggccagcatctacagggcacaagtgggaatctgggttctaggaggtgagaactggggggtggggggttgcaatgggtggagagtgctttcccttccctgcaggccttctcacgtccacagggttgcaagcgggactggcagagttgaaacaaaagtcagggagcagggctgggcgcagtggctcaagcctataatcccagcactttgggaagccgagggaggctgatcacctgaggtcaggagttcgagaccagcctggccaacatggagaaaccccgtctctacaaaaaatacaaaaattagccgggcttggtggcgggtgcctgtaatcccagctactcgggaggctgaggctggagaattgcttgaacctgggaggcggaggttgcagcgagccgaggtcgcaccactgcactccagcctgggtgacagagcaagactccatctcaaaaaaacaaaagaggagtgtgggaacaagtagtgaagatttccaccgttcaaatcccgccactcccccccggggctctgtgacctcaggaaggcacatgacctcccacacttcagtttgcccatctataaaatgaggataatcgtggtacctcctttggaagccttttgtgagaatttggtaagttctggtatgtgttaagtgtttggagtggggcttggggtatggtgaagagtttatattaaaaaaaagaaaaaaaaccttcaagttgggcatagtggtgcacgcctgtaatcccagcactttgggaggccgaggcgagcaaatcacttgaggtcaggagtttgagatccacctggccaacatggtgaagccctgtctctagtataaatacaaaaattagccgggggtggtggtgcacacctatagtcccagctactgaagaggctgaggcaggagaatctattgaatctgggaggcagaggttgcagtgagctgagatcgcgccattgcactccagcctgggcgacagagccagactccacctcaaaaaaaaaaaaaaaaacaaacaagaatcgtttggttgcagctgacagaaattgaaactacaactggctcctttttaaaaaacaggaattttttgctcatggaactgaaagatttagggatagagctaactcaaggccacccctctcagcaccgttgatgttctggaaaggaccattcactagggtgggggccgtcctgggcacacagggtgctcagcaatgaccctggcctccacccagtcaacgtctgtagcgtccccacccggtcatggtgaccaaaaacatctccagacattgctgagtgtcccctgggggtgtaatcacccttggttgagccctactggtctggcgggtttcagacacagctggatccaggaccctcggtcagtgtcacaaggatgtgtccaattctccatctcttagcattgccatcccctctcttggcttttttcttttcttttcctttctttttttttttttttttttttttttgagacagggtctcgctctgtcacctctgctggagcccaataatgtgacctgagctcactgcaacctctgcctcccgggttcaagtgattctcctgcctcagcctcccgagtagctgggactacgggcgtgcgacaccatgtctggctaatttacgtatttttagtagagatgggcttttgccatgttggccagtctggtcttgaactcctgacctcaggtgatccacccgccatgacctcccaaagtgctgggattacaggcgtgagccaccgtgcccggtctctcttattttttttttcttcaacagactttgcctttatggggaaaagatgatgccataagccccaaatctcatctgcccatcatcttaacagccctggcaggagtcaacacctcttcccaaggtgggggcaccaaagtgccagggaggttctcattcgcccagcctgggtcacatgtcctggtgggctgtggcctggtaaggggatgcccagattggccaggcagggatcacatggttgtatggagtgagccaattgggtgaaaactcgtggtcgggatgggcacggcggctcacgcctgtcatcccagcactttgggaggccgaggcgggcagatcatgaggtcaagagttcgagaccatcctgggcaacatggtgaaactttgtctctactaaaaatacaaaaattagctgggagtggtgttgcatgcctgtaattccagctactcgggaggctgaggcaggagaatcgcttgaacccgggaggcggagcttgcagcgagccgagatcgtgccactgcactcccagcctgggcaacagagtaagactctgtctcaaaaaaaaaaaaaagtacaaaacatgagccgggcatggtgacgcacacctgtggtcccagcaactcaagaggctgaggagggagaatctcttgaaccaaggaggtggaggttgcagtgagctgagattacatcactgccctccggcctgggtgacggggtaagactctgtctcaaaaaaaaaaaaaaagggccgagtgcggtggctcacgcctgtaatcccagcactttgggaggctgaggcgggtggatcacgaagtcaggagttcaagaccagcctggccaagatggtgaaaccctgtctctactaaaaatacgaaaattagctgggcatggtggcggatgcctgtaatcccagctactcgggaggctgaggcagagaattgcttgatcccgggaggcagaggttgcagtgagctgagattgcgccactgcactccagcctgggcaacacagtgagactctccttctcaaaaaaaaaaaaaaataggccaggcatggttgctcacgcctgtaatcccagcactttgggaggctgaggcaggtggatcacgaggtcaggagatccagaccatcctggctaacacggtgaaaccccgtctctactaaaaatacaaaaaattagccaggcgtggtggtgggcgcctatagtcccagctactcaggaggctgaggcaggagaatggtgtgaacccgggaggcagaggttgcagtgagccgagatcgcgccaccacactccagcctgggcgacagagctagactctgtctcaaaaaaaaaggaaataataataataacaaaaaacaaaaacaaaaaaaccctcctctatggacagaggcatgattggcaggggtgggatagctgttggcaaagaaggcccagctgtgctaagcaggccacccatcccatggaagggctggcatggaggcagcaccagtagacatcagaggatgaatgagtgggatccagtgctgctcaatgaatacatgcgggttgttttgtttttgtttttttgtttttttgagacagagtcttgctctgtcgcccaggctggagtgcagtggcacgatctcggctcactgcaacctccgcctcccgggttcaagcaattgtccagcctcagcctcccgagtagctgggactacaggcgcccaccaccacacccggctaattttttgtattttcatttgtttgtttatttgtttgtttgttttgagatggagtctcactctgtcgcccaggctggagtgcagtggcatgatctcagctcactgcaacctccgcttcccaagttcaagtgattctcctgcctcagtctcccaagtacctggaactacaggcgcccaccatcacacccagctagttttttttttgttttgttttttgttttttttgagacggagtctcactctgtcgcccaggctggagtacagcggctccatcttggctcactgcaacctctgcctcttgtcttcacgccattctcctgcctcagcctcccgagtagctgggactacaggtgcccgccaccaagcctggctaatttttttttttttttgtatttttagtagagacagggtttcaccgtatttgccaggctggtcttgaactcctgacctcgtgatccacccacctcagcctcccaaagtgctgggattacaggcgtgagtcaccgcgcctggccaattttttgtatttttagtagagatggggtttcaccatgttgggccaggctggtcttgaactcctgaccttgtgatctgcccgcctcggcctcccaaagtgctgggattacaggcgtgagccaccacagccagcctttttgttttgttttgctttgttttgtttctcttttttaattgagacacagtcccgctctgtcacccaggctggagtgcagtggtgcgatcttggcccactgcaacctccacctcccaagttcaagcgattctcctgcctcagcctcccgagtagttgagattacaggtgcgcaccaccacacctggctaattttgtatttttagtagagacgggttttctcatgttggccaggctggtctcaaactcctgacctcaagtgatctgctcacctaagcctcccaaagtgcagggattacaggtgtgagccactacacccagcctcttttttttctttttctttttgagacagggtttcgctttgccatgcaggctggagggcagtggtgcaaacagggctcacaggcagaggctgctctgcctcctaggatcaagggatcctcccaccgcagcctcctgagtaactgggattacaggcacaagccatcatgcccaggtaatagttttaaggttttttttagtagagatggggatctcactatgttgctcagcctggtctcgaactcctggcctcaagtgatcttcccgcctcagcctcccaaagccttgggattactgggtgagcccccgtgcccagccagtggctgcttgcactggctggcctccaaagctgaaagtatttgctccctggcccttaacagaataggtgggctgacccctgctctatgtggttctttgtccccaggcaaggattcagggacatctcagagccgctggggtctcgtcggtaaagtggtggtggacggcatggaggaactttagccctggaccagaaactttaggtcagtctatgtcagccattgttgctatcagccttcaggtcgtctgggctgggaggtctcctccctcttcctccaggcaccagtgggagcaggcagtcacaccttcctgtgagtgagaaccatagcagaaccttcaaagcacctctcaagtcgggtgagtcagcagaggcctgcagacagggttgacgggggcagggtgtggggatgtgggagacccagactgggggccagcaaaggctgttcggaggaggtgaccactgagctatgacctgaatgagtgaacgaggcagttattttatttttttgagatggagtttcgctcttgtcgcccaggctggagtgcagtggcacaatctgggctcactgcgacctccacctcccgggttcaagcgattctcctgcctcagcctcctgagtagctgggattacaggcggccgccaccacgcacagctagttttgtatttttagtagagatggggtttctccatgttggccaggctggtctcgaactcccgacctcaggtgatctgcctgcctcggcctccaaaagtgctgggattacaggcgtgagccaccgcgcccgggaacttcaagtgattcttgaaggagacaattatgtgggtccatggggaggagcctttgaggtggcaggagggaaccagtcctgatgagggaagattaaaggacagtggggctggggatggtggcccacacctgtgtttgcagcactttgggaggctgaggcaggaggatcactagagcccaagagttcaagatcagcctggcctacaaaaaaatatttaaaaatttgctgggtgtgggaggctgaagtcagaggatcacctgagcccagggagttggaggctgcagtgagcggtaatcatgccactgcacttcagcctgggggacagagtgagaccctgtctgaaaaaaaaaaaaattgggccaggtgcggtggctcatgcctgtaatcccagcactttgagaggccgaggcgggcggatcccgaggtcaggagatcgagaccatcctggctaacacagtgaaaccccgtctctactaaaaatacaaaaaattagccgggcgtggtggcaggcgtctgtagtcccagctactcgggaggctgaggcaagagaatggcctgaacccaggaggcggagcttgcagtaagctgagattgtgccactgcactccagcttgggcgacagagcgagactctgtctcaaaaaaaaaaaaaaaaattagccgggcatgggggcacatgcctgtaatcccagctattgaggaggctgaggcaggagaattgcttgaacccgggaggtggaggttgcagtgagccgaggtcgcaccattgcactccagcctgggcaacaagagcaaaactccatctcaaataaataaataaataataaaaaaataaaaaataaagagggtgggcatgatggctcaagcctgtaatcccagcattttgggaggctgaagcaggtggatcacttgaggtcaggagttcgagaccagcctggccaacatggagaaaccctgtctctactaaaaatacaaaaaataaaataaaataaaataaaataagccaggtgtggtggcgggtgcctgtcatcccagctaactgggaggctgaggcaggagaatcacttgaactggggagaaggaggttgcagtgagccaagacagctgcactgccctttaacccaggcaatagagtgagactatgtgtcaaaaaaaaaaaaaaaaaaggacattattagagttggaaggaaatgaccataggcccagggttccacggtccagaccaccacacacaactgatgcaggatataaccgagtcattccatcccaggtaatacccaagtacccacgggaggatcaacatccacggaaaagcctgtgtacaaatttcatagtagcaaatgcttctcctatgcgtcttttttttttcttttttcttttttttttttttgagacagagtcttgctctgtcacccaggctggagtgcagtggcacgatctcggctcactgcaagctctgcctcctgggttcaagcaattctcctgcctcagcctcctgagtagccgggactacaggcgcgcgccactgcgaggctaattttttgtacttttagtagagacggggtttcaccgtgttagccaggatggtctcgatctcctgacctcatgatccgcccgccttggcctcccaaagttgtgggactacaggcgtgagccaccgctcccggacacgtctggctaatttttttgtatttttactagagacgaggttttgccgtgttccccatgctggtctcaaactcctgggatccagtgatccacccaccttagcctcccaacatgctgggattacaggtgtgagctactgtgtccggcccaaattgtctaatttttaaaaatagtttctgggttatggatctgaataaagcgtgcaattagtgaacagtttataaacctcttgtgtgcttttaatttattttattttatttatttatatatattttttgagacagagtctcgctctgtcacccaggctggagtgcagtggtgcgatctcagctcactgcaacctctgcctccagggttcaagcgattctcctgcctcagcctcacgagtagctgggattacaggtacctgccagtatgcccggctaatttttgtatttttagtagagatggggttttgccatgttggccaggctggtctcgaactgctggcctcaagtgatcctccctcctggccctgcacagtgctgggatgacaggctgagccacctcaccggcctcttatgtgccttttaatctgcaggttcgccctccctctctctttctgtggtttgtttttgtttttttttttctttttttcttttgtatgaaacccagttgtttttcctgttaagtttcccacagtctagaatttgctgatttttttctgtgataatttaagtttttgaatagtgatgcattcccgtgtcgtaaaactgaagagtcaaaagcatacccagactgcagccgctggggaagagtgtggtagctccacaagaagttaaacggaggcggggtacgggggctgggcgtggaggccgggcgcaggggcggatgcctgcaaccccagcacgctgggaggccaaggcgggcggatcacttgaggtcaggagtttgagaccagcctgactaacatagcaagaccccatctctacaaaaaatacaaaaaaattagctaggcatggttaactgctgtttttgtcaagatgggttattactatgttgcccaggctggtttcaaactcctgtcctcaactgactcagaaggatcaacttagcccaggagttcaacatagcgagaccctgtctctacaaaagaaatgttaaaaaaattaaccaggcctggtggcatgcacctgtactcccagctacttgtgaggctgaggtgggaggactgtttgagccatggagtctgaggctgcagtgagctacgattgcacctggaacccaggcctctcccgtctggaacccaggccctcacctacactgtcagcccctccacctggaacttgtagaacttacctgtaagcccaggcttcacctgaaaccccagtcccccacctggaacccaggccctcacctacactgtcagcccctccacctggaactttagaacttacctgtagccccagccttcacctgaaaccccagtcccccacctggaacccagtcccccacctggaacctgggcctccccaacctgtaacccaggcccccacctagaacctgggcctctgtgatctgtaacccaggccctcatctggaacctagggctctgtggaaactgtggcactcacatgtaaacctggcttccacctgaaaccccagtcccccacctgtaatccagcttgggtgagacagcaagaccctgtctcaaaaaaaaaaaaaaaaaaaaggccgagcacggtggctcacgcctgtaatcccagcactttgggaggccgaggcaggtggatcacaaggtcaggagttcaagactagcctggccaatacggtgaaaacacgtctctaataaaaatataaaaattagctgggcatggtgatgggcgcctgtagtcccagctactcgggaggctgaggcaggagaatcccttgaaccgggagacagaggttgcagtgagccgagatcgtgccactgctctctagcctgggcaacagagcaagactccgtttcaaaaaaaaaaaagggaataaatgtcatgttacatatattttatgagaattctaaaatatattttatggcagggcacagtggctcacgcctgtattcccagcactttgggagtctcgctctgtccccaggctggagagcagtggtgcgatctcggctcactgcaacctctacctcccgggttcaagcgattctcctgcctcagcctcccgagtagcttggactacaggcgcccgccaccacgcccggctaattttttgtatttttaatagagacagggtttcaccgtgttagccaggatggtctcgatctcctgaccccgtgatctgcccccctcccaaagtgctgtgattacagacgtgagccaccgcgcccggcctattattttttactttttttttttttttttgaggcggagtcttgctctgttgcccaggctggagtgcagtagcatgatctcggctcactgcaaccaccgccttccaggttcaagcgattctcccgcctcagcctcccaactagctgggattacaggtgcccgccaccacgcccggctaatttttgtatttttagtagagatggggtttcaccatgttggccaggccggtcccgaactcctgacctcaggtgatccacccgcctcagcttcccaaagttctgggattacatgcgtgagccaccgcgcccggcctatttttcacttttttttttttagccgaatgtggcgaggacagttatcggattatttgcagcggatcctacacgtcccctcctcctgcctcttgccctgcgctcccgaaggggcctccggacccggaggatctcaccgcggggcggggtccacggcgagggggctcggccaagcgggcagcctcgcgcacgcgcactcaacccggacgcgggcctctccgccgcagcccgcgcccgccacctggcggccacagcggtccgcgcagaccgccggccccttttctatccgcgaccggatacctggcaggggtctaggaaagacccctctggctgctgcggggccagtgcgtgcgaggctcgaccccactccattgcgtgggggggctgagctaggtccgtgaagcggggcggttgcgatcaaggccccgactttttttttttttttttttttttttttttttttttgagacggagtctcgctctgtcgcccaggccggactgcggactgcagtggcgccatctcggcgcactgcaacctctacctcccgggttcaagcgattctcctgcctcagcctcccgagtagctgggactacaggcgcccgccaccgcgcccggctaattttttgtatttttagtagagacggggtttcaccttgttagccaggatggtctcgatctcctgacctcatgatccacccgcctcggcctcccaaagtgctgggattacaggcgtgagccaccgcgcccggccaaggccccgacttttagaccactagtggaggaggtctgggacacgggtctgcggccagagagaggccaggagggaggactggcgggcatttctccgcagggtgggggtgaacgggggcctgggcatcggagccggggggaacgtggggtcagcgaggggttctaggggaggaaatggtaggagagctcctgccctgcaggctggagggcaggatctgtgtgtttggggggagtcatgggtgggtaggagagatgacaggtgacagcctggaggaagagatggagggaggcttgagccctgggcggggctggcagaagcccccacctataacttgggacctctgaacctggaacccagcccccacctgggacctgggcctctcccatctgtaacccaggccctcacctagaacctctgaacctggaacccagcccccacctgggacctgggcctctcccatctgtaacccaggccctcacctagaacctgggacctctgaacctggaacccagcccccacctggggcctggaacctccaccaggaacttgtgcccccctctttggaacccttgccttcacctgaaaacccagttaccggctgggcgcggtggctcacgcctgtaatcccagcactttgggaggccaaggcgggcagatcacgaggtcaggagatcgagaccatcctggctaacacggtgaaaccccgtctctactaaaaatacaaaaaattagccaggcgttgtggcgggcgcctgtagtcccagctactcgggaggctgaggcaggagaatggcgtgaacccgggaggtggagcttgcagtgagccgagattgcgccactgcactccagcctgggcaacaaagcaagataccgtctcaaagaaaaaaaaaaggaaaacccagttccccacctagaacccaggccccgacctgaaacctgggcccctccacttgtaaccagggacccccacctagtatctgagcctctcccatctgtaacccaggccttcacctagaacctgggcctctgcaagtgtaacctggggttcctaccaggaacctgaggccctcatgtgtaacctgcggcccccgacctggagcctgggcctctctcatctataacccagaccctcacctagaacctgggcccctgcaactgtaacctgtggcactcactgtaagcccggacttcacctgaaaccccagtcccgcacctgtaaacctacaccccgccaggaacctgggcctctccaacctataattgaggccctcacctgtaacttaagcccacacttgtaacctggggctctctgctataacttggggcccccacccataagccagttcccttaacagaacctgcagtttggtgaggatgagagaatgcaaagaaagcattttccccaggactaccataaatagtcataagcatcactttttcctattaccatagcattaccatttgtcacggtttacccacccgaggtcactctgcctctttttcactttattttttttttatttttatttttttgagatggagtctctctctgtcgcccaggctggagtgcggtggcgcgatctcggctcactgcaagctccgcctcccaggttcacgccattctcctgcctcagcatcccgagtagctgggactacaggcgcccgccaccgcgcccggctaattttttgtatttttagtagagacggggtttcaccttgttagccaggatggtctcgatctcctgacctcatgatccacccgcctcggcctcccaaagtgctgggattacaggcgtgagccaccgcgcccggccaaggccccgacttttagaccactagtggaggaggtctgggacacgggtctgcggccagagagaggccaggagggaggactggcgggcatttctccgcagggtgggggtgaacgggggcctgggcatcggagccggggggaacgtggggtcagcgaggggttctaggggaggaaatggtaggagagctcctgccctgcaggctggagggcaggatctgtgtgtttggggggagtcatgggtgggtaggagagatgacaggtgacagcctggaggaagagatggagggaggcttgagccctgggcggggctggcagaagcccccacctataacttgggacctctgaacctggaacccagcccccacctgggacctgggcctctcccatctgtaacccaggccctcacctagaacctctgaacctggaacccagcccccacctgggacctgggcctctcccatctgtaacccaggccctcacctagaacctgggacctctgaacctggaacccagcccccacctggggcctggaacctccaccaggaacttgtgcccccctctttggaacccttgccttcacctgaaaacccagttaccggctgggcgcggtggctcacgcctgtaatcccagcactttgggaggccaaggcgggcagatcacgaggtcaggagatcgagaccatcctggctaacacggtgaaaccccgtctctactaaaaatacaaaaaattagccaggcgttgtggcgggcgcctgtagtcccagctactcgggaggctgaggcaggagaatggcgtgaacccgggaggtggagcttgcagtgagccgagattgcgccactgcactccagcctgggcaacaaagcaagataccgtctcaaagaaaaaaaaaaggaaaacccagttccccacctagaacccaggccccgacctgaaacctgggcccctccacttgtaaccagggacccccacctagtatctgagcctctcccatctgtaacccaggccttcacctagaacctgggcctctgcaagtgtaacctggggttcctaccaggaacctgaggccctcatgtgtaacctgcggcccccgacctggagcctgggcctctctcatctataacccagaccctcacctagaacctgggcccctgcaactgtaacctgtggcactcactgtaagcccggacttcacctgaaaccccagtcccgcacctgtaaacctacaccccgccaggaacctgggcctctccaacctataattgaggccctcacctgtaacttaagcccacacttgtaacctggggctctctgctataacttggggcccccacccataagccagttcccttaacagaacctgcagtttggtgaggatgagagaatgcaaagaaagcattttccccaggactaccataaatagtcataagcatcactttttcctattaccatagcattaccatttgtcacggtttacccacccgaggtcactctgcctctttttcactttattttttttttatttttatttttttgagatggagtctctctctgtcgcccaggctggagtgcggtggcgcgatctcggctcactgcaagctccgcctcccaggttcacgccattctcctgcctcagcatcccgagtagctgggactacaggcgcccaccaccacgcccagctaaattttgcattttttagtagagacggggtttcaccatgttagccaggatggtctcaatctcctgacctcgtgatccaccctcctcggcctcccaaagtgctgggattacaggcatgagccaccgtgcccggctcactctgcctctttatatccagagtgtcatcaaatttatgaattcaaggccaggcttagtggctcatgcctataatcccagctttttcggaggccaaggtaggtggattacttgatgtcaggagttcgagaccagcctgggcaacatggtgaaactccgtctttactaaaaatacaaaaattagctgggcatggtggtgggcacctgtaatcccagctactcgagaggctgagacaggagaatcgcttgaacccaggaggcagaggttgcagtgaaccaagactgcgtcactgcactccagcctgggcgacagagcaagactctgtctcaaaaaaagaaaaacacaggccaggaacggtggctcacacctgtaatcccagcactttgggaggccgaggcgggcggatcacaaggtcaggagttcaagaccagcctggccaatatggtgaaaccccgtctccactaaaaataaaaaaaaaaaacctagccaggtgtggtggcgcacgcttgtaatcccagctactcgggaggctgaggcaggagaatcgcttgaacccaagaggtggaggttgcagtgagctgagattgtgccactgcactccagcctggacaatagagggagactccatctaaaataaatacataaatgaaaatgtgtagatatctacgagttcggtggggattcatacaacagtgcatctcattcccgaccgtgtcttatctttgatgacagggtcatcgttaatcctccatccagagaaatgggaagttagaggccaggacctcccagctgaagatttctgtgggacacagggctgggccagagaaaagggccctgcaggagacccttagaatagccgccgggcgactggccccacggtgccgggaaggaccctttgatctgattccgccatatgatccggttccgtgctggcccagcctggcctgggttggatgcctggtccgatgcccaaagccccatcaccctgaagcagatggagctggcatcctgaatgagactcctgggggctccagggctctcaggtgggagtcccagagccaccagggacctggagtgtagacctgggcagggagcttgctctctgccagctgcagtgggctcacctgtgagggaggatgttagaatagttcttttttaaaaaaaaaaattttttttttgagacaggatctggctctgttgccaggcaggaatgcagtggcgtgatcatggctcactgcaacctccacctcccgggctcaggtgatcctcccacctcagcctcccaagtagctgggaccacaggcgcccgccaccatgactggtgagtttttgttttttgttttgttttgttttgtttttgagacaagagtctcactctgttgcccaggctggagggcaatggcgcgatctcggctcactgcaacctccgcctcctaggttcaggcaattctcctgcttcagcctcccgagtagctgggattacaggcgccagccaccacgcccggataattttgtatttttagtagatactgggtttcaccatgttggccacgctggtctccaattcctgacttcaggtgatccgcccgcctcggcctcccaaagtgctgggattacaggctgcgagctaccgcgcctggcccctagtttttgtactttttgtagagattggttttcaccatgttgcccaggctggtcttggactcctgaactcaagcaatcctcccgcctcggcctcccaaagtgctgggattataggggtgagccactgcgcccggccttgttttcttcttttcagtagagacagggtcttgttctattgcccacactggagtgtagtgacataatcccagctcactgcagcctcaaactcccagcctctgttgatcctactgcctcagcctcccgagtagctgggactacaagcgtgggccactgctcctggtctattttcagttttttttttttgtttgtttttgagatggagtctcactctgtcgcccaggctggagtgcagaggcatgatctcagctcaccacaacctcctcttcccaggttcaagcaattctcctgcctcagccttccaagtagctgggactacaggcatgcaccactacgcctggctaatttttgtattttttaagtagagacaggctttcaccatgttgcccaggctggtctggaactcttggcctcaagggatccgcccacctcggcctcccaaagtgatgggattacaggcatgagctgccatgcctggccctattttcactttttgactcttgtgaataacgctgttttgaaaattcatgcgtgtttgtgtgaacaggtttctagttctctcgggcatatatcttggggtggaattgccagtacatatagcaactctatgtttaaacttttgactcttttccaaaggggttgccccgcttatgagaattctggtttctccacatcctcaccaatacttgttatggtccatctttttttgttatttatatattttatctatttttatttttttgagacggagtcttgctctgtcgccaggttggagtgcagtggcgtgatctccgctcactgcaacctctgtctcccgggttcaagtgattctcctgcctcagcctcccgagtacctgggattagaagggtgcgccaccacgcccaactaatttttgtatttttagtagagacggggtttcgccatgttggccaggatggtcttgatctcctgacctcatgatccgcccgcctcggcctcccaaagtgctgggattacaggcgtgagccactgcacctggcctgttatttatgtatttatttttttttgagacaagttcttgctatgttgcccaggctggcctcaaactcctaggctcaagagatcctcccaaagttctgggattacaggtgtgagccactgtgcataaccctgaagtggttaattttaataatacatttactttagcctaacatatccaaaattacatcatttcaacatgcaatcattattaaaattattaatgagatattttattttatttttatttatttatttttttgagacggagtctcgctctgtctcccaggctggagtgcggtggcgcgatcttggttcactgcaagctccgcctcctgggttcacgcctttctcctgtctcagcctcccgagtagctgggattacaggtgcccgccaccacgcccagctaatttttgtatttttagtagagaccaggtttcaccacgttggccaggatggtctcgaactcctgacctcgtgatcagcccaccttggcctcctaaagtgctgggattacaggcgtgagccactgtgtctggccagtgagatattttatttgtgccctttttttttttttttgagaccgagtctcactgtgttgcccaggctgcagtgcagtggcacaatcttggctcactgcaacctctgcctcccaggttcaagcgattctcttacctcagcctcctgagtagctgggattacaggcgggcgccacgacacctggctagtttttgtatttttagtagagacgggggttttaccatgttgcccaggctggtcttgaactcttgacctcaggtgatcacctgccttggccccccaaagtgctgggattacaggcaaaagccgccataccaggcccatttttttttctttcgagacggagtctcattgttgcccaaggtggagtgcaatggcaagatctcagctccctgcaacctctgcctcctgggttcaagcgatcctcctgcctcagcctcccaagtagctgagattacgggcgcccgccaccacgcctggctaatttttgtatttttagtagagacagggttttaccacgttggccagactggtctcaaactcctgacctcgggtgatccatccgcctcggcctcccaaagtgctgggattacaggtgtgaactaccgtgcctggcaggcccatttttaatttttctaactttggaaattcagtgtgtagggcaggcatggtgcctcatgcctgtaatcccagaactttgggaggccgaggcaggtggatcacctgaggttaggagttcgggaccagcctgaacaatatggtgaaaccctgtctctattgaaaatccaaaaattatccagccatggtggtgtatgcctgtagtcccagctactccagaggctgagacaggagaattgcttgaatctgggaagcagaggttgcagtgaaccaagatcatgccattgcactccagcccgggcaacagagcgagactccgtctcaaaaaaaaaaaaagagagtcagtgtggagggaagtgtctctgttgggtccgggtgctctgtgggactctgaggaaaagctcgcaccaggtagatgctgttctgtccccatgggtaaaggacaccccaacaaaccgaggagcaaaatgtcctcgtatgccctcttcgcgcagacctgccaggaagagcacaagaagaaacacccggactcttctgtcaatttcgtggaattctccaagaagtgtttggagagatggaagaccacgtctgcaaaggagaagtgaagtttgaagagaaggcaaaaagtgacaaagctcgctgtgacagggagattaaaaattacattcctccgaaatgtaagaaagggtaagaaaggaaagaaaaaggatcgcaatgctcctagaaggccaccatctgccttcttcctgttttgctctgaacatcgcccaaagatcaaaagtggacacccaggcctatttgtcgtggaaactgcaaagaaactgggtgaaatgtggtctgggcagtcagccaaagataaacaaccatatgagcagaaagcagttaagctacaggagagatatgaaaagggtattgctgcatatcgtgctaagggcaaaagtgaagcaggaaagaagggctcaaagaagaacaaaccagaagatgaggaggaggaggaggagaaagaagatgaagatgaggaggaagagggtgaagatgaagaataaatggctatcctttaatgatgcctgtgcagtgggcttgttttgctaagaatgtgaattctagtacagctcagtattagcttcagtataaaactgtacaaattttcgtatagctcataagattctctgtacagaaaatacttttcttttcttttcttttttttgagacagagtttcgctcttgttgcctaggctggagtgcaatggcgtgatctcggctcaccgcaacctccgcctcccgggtcctggttcaagcagttctcctgcctcagcctcctgagtagctgggattacaggcacatgccaccacgctcagctaatttttgtatttttagtagagatggggtttcaccatgttggccaggctgctttcaaactcctgacctcgtgatccgcctgcttcggcctcccaaaatactgggattacaggtgtgagccaccgcaccctgcctaatgtccctaaatatttaatggtttttaaaaaatttattgtgtatggcagcacagcacacttgtaggaattagtatcaacagtacatcttgcgttttttaagatgctgcattttttaacattttgtaataaaattatgcgtatcaaaaaaacaaagaaattccgtgtgtagttcacactcacagcacatctccgtccaggcacttgagagaatgactaggaggggttcttggaggaggtggtctttgaacggagaatccatcttcaaggattctgtctgtaatggtcaccaagtatttcctgagtcacttccatgtgtcctgcagttctctgaaggggcgtgggacctaccgatgccaattatccagcattatctccagattccaagaagttggggtgtgagccagcaatcagtacagaaaagagataccaaaataagtttgagttggggagtgttccttcaacttcagttttctggaagagatcttttttttttttttgagacagagtttcgctcttattgcccaagctggagtgcagtggcacgatctcggctcaccgcaacctcctcctcccgggttcaagcgattctcctccctcagccttctgagtagctgggattacagacatgcacctgtaatttctactaaaaatacaaaaattagccgggcgtggtggcgcacgcctgtaatctcagctactggggaggctgaggcaggagaatcgcttgaaaccaggaggcggagattgtaccaagatagtttgttccagctaaacaacctggcgctagtgcaggaaaaggtggaaggcacggggctagcacaggagggttcaatattttcaaccttatcaagccatattttggcaactcttgtttttcacgagaagcccccgctgggcttgtcccagcgctgtcctgaggcttcccccatgagttccgatagggcagaggccgccctgagcgtttctctttcccctggtccaagagtggctcaaaagaaggatttttgactggaattggccactttgtgttactttttgacccttgacctcgccccaaagggggatgcgggggaggggctctggtaggggtggccccgctccttccaggtccgcaagcccaggttcccgcccaccgggctcagcccaccctgcggccgttcagggaggccgttggcacccgtgacctacgacccccttcccgagccccaccgaggtcacagccgtggcctcgtctccccatgcctgcttcccgccccctgcccgtgacgggcgtctccgaggaccaatgagcgcgctgtatccacccctcgggcggggccaagcgccgaccaatcgccgctcgggcgcccggccgggtccaaacgctccaatcgtcagcggcggcggggcgggcagagggccggggatggcaggttcaaccaacgggtgggcacgtcgtcctcgcgaggaggcgtgccctgcggccgggcgtgcggtgtccgcggcggcgcagggagggggagggaggtaaacaagatggcggcggcgtgtcgggcgcggaagggggaggcggcccggggcgcccgcgagtgaggcgcggggcggcgaagggagcgcgggtggcggcacttgctgccgcggccttggatgggctgggcccccctcgccgctccgcctcctccacacgcgcggcggccgcggcgagggggacgcgccgcccggggcccggcaccttcgggaaccccccggcccggagcctgcggcctgcgccgcctcggccgccgggagccccgtggagcccccgccgccgcgccgccccgcggaccggacgctgagggcactcggggcggggcgcgcgctcgggcagacgtttgcggggaggggggcgcctgccgggccccggcgaccaccttgggggtcgcgggccggctcggggggcgcccagtgcgggccctcgcgggcgccgggcagcgaccagccctgagcggagctgttggccgcggcgggaggcctcccggacgcccccagccccccgaacgctcgcccgggccggcgggagtcggcgccccccgggaggtccgctcggtcgtccgcggcggagcgtttgctcctgggacaggcggtgggaccggggcgtcgccggagacgcccccagcgaagttgggctctccaggtgtgggggtcccggggggtagcgacgtcgcggacccggcctgtgggatgggcggcccggagaagactgcgctcggccgtgttcatacttgtccgtgggcctgaggtccccggaggatgacctagcactgaaaagccccggccggcctccccagggtccccgaggacgaagttgaccctgaccgggccgtctcccagttctgaggcccgggtcccactggaactcgcgtctgagccgccgtcccggacccccggtgcccgccggtccgcagaccctgcaccgggcttggactcgcagccgggactgacgtgtagaacaatcgtttctgttggaagaagggtttttcccttccttttggggtttttgttgccttttttttttcttttttctttgtaaaattttggagaagggaagtcggaacacaaggaaggaccgctcacccgcggactcagggctggcggcgggactccaggaccctgggtccagcatggaggtggtggacccgcagcagctgggcatgttcacggagggcgagctgatgtcggtgggtatggacacgttcatccaccgcatcgactccaccgaggtcatctaccagccgcgccgcaagcgggccaagctcatcggcaagtacctgatgggggacctgctgggggaaggctcttacggcaaggtgaaggaggtgctggactcggagacgctgtgcaggagggccgtcaagatcctcaagaagaagaagttgcgaaggatccccaacggggaggccaacgtgaagaagtaagtatggcttgctggggtcggggccgggccgggccagtcacggtgctgatggttctgtcttccttccttctctcctccctccctcccttacttcctcttaacaccctgagctggacccgtctggcgcctgtgtcctccgtgccagggagagcgtggttgggggcctgcgttacggactttcactcaggcaaggccagttgtcgcagcggggcgtgcgtttgcatgggctcttggactccagttaaaatgccctggtagcgaaaccctcctgagaagggagcggcccccaatcccctaagactagccccttggctcccccagctgtccaaggagcagaggcgcccagtggaatcagcctgtgtttgtttgggccccgagagtttgtgtgcggccgccaacacgttttctgcgcagtgtgtggccgttaccggggccaggcgaaatgtgatttgtttatcctgtcagaggggaaccctgggctgccaaaaataactgtttgcaccggcttatcagtcagcaggagggaaacgtagcctttcctcatttgccagggatgtgacgctggaagcatccctggcccccggggctggaagccctgcccgagggggactgtgcctccctcccgaattgcatccggaagaccttacttttccaactgacttcttcaggcacggggctgccgctgggcatcccggacgcctctgcatctgtgcgcggagaagctcctacctagggcagcactggccggcctgagcctctcccagctggtgggggtggccgggggtgtccctgccttatcgcagccagacacgctgcacctgccgccgcctggcgggccctgcccaggccctgctcctttcccagccttcttaactttcaaaactttgcctcctgtttccaagaaaggaccttatctgctgggctaggcctcgagggactggcaaggacaccctgcgcagggcaccatgaccttggaaggaggtccggggaggggctgctgcggtgtctgctctcaccttcctcctgctcaggggccctggggctcctgccgtgtctgctctcacctctctcctgctcaggggccctggggctcacgtacatttttttttttttttttttgagacggagtctcgctctgttccccaggctggagtgcagtggcgcgaactgggctcactgcaagctccgcctcccgggttcatgccattctcctgcctcagcctcccgagtagctgggactacaggcacccgccaccacgcccggccaattttttgtatttttcagtagagacggggtttcaccgtgttagccaggatggtctcaatctcctgacctcgtgatccgcccgcctcggcctcccaaagtgctggtactacaggcgtgagtcaacgcgtgcggcctttttttttttttttttttttttttttgagacggagtttcactcttgttgctcaggctggagtgcagtggagtggtcttggctcactgcaatctccgccccctgggttcaagtgattctcgtgcctcagcctcccgagtagctgggattacaggtgcctgccacagtgcccagctaattttttttttttttttttagtagagacggggtttcaccatcttggccaggttggtcttgaacttctgacctcgtgatccacctgcctcagcctcccaaagtgctgggattaaaggcgtgagccaccgcgcccggccagcacgcttcttaatcagcatgcaggctgtgacatgcggaaaccaggggcacaggctctgaagtttgtactctggagctggagcagtcagggttaaatgggagcggctgggaagggtgtgtttccacgaggcctttctgatgtctcagtgcccagtctggacccgggtagaaggtgtggccagtgccttgagtcagtggagcagttgcctgtgcctggtctctgtgagatgggttggtcaggggctaggcagagcctgtgcctggtctctgtgagatgggttggtcaggggctaggcagagcctgtgctgggggtagcaggtgccctctaaaggggccagtgacagtctctctcccagcagtgagaaacccacgcttaggggccgggcgcggtggctcacgcctgtaatcccagcactttgggaggctgaggtgggtggatcgcctgaggtcaggagttcgagaccagcctggccaacatggtgaaaccccatctctactaaaaatacaaaagttagccgagtgtggtggcgtgtgcctgtaatcccagctactcgggaggctgaggcagaacattgctggagcctgggaggcggagcttgcggtgacccgagatcgcaccattgcgctccagcctgggcgacacagcgagactctgtctcaaaaataaataaataaataaataaataaataaataaataaataaatctggcttgagttttgacaaatgtatatgcagggtcaatgggaagacagacgctggagggtggaagcctgactgtgagagtgagccccctgctttcctgaacagtcagtggaggaggtcctgggagctcaggtgagcacctgaacggtagggcagagcctgagggtcttggtggagacaggcaagaaggttgcaggaacctagtctggcccagtgcctgggagaacgggagggaacacggaggcagggaggcagaggggttggcaggacctggactggactgtgcgtcgcagctacccacagcttgaccccactgccttgaagtgagtgatgcaccctcactagtgttcagcgtccaatttcatcctggccctgagtgtgtaacggctttgcccttgcggggccccctgggatgaggggtgagccctgtcccttcctggtcactgtctgccatcaggagctgccccgcttacagctgtgattcaggagccactgcatttcctccagccccctgggtgctgccagggggtcctcctattctgggagctggtgtgttctgactggaggctgccatgtgcagagtgctgtcaaggagaaggggtgtccactgcccagccctgaggcccaaggccttggccagccttgctgccagcgctgcagggaaaaagcctcctttgtgtgtgggaagtttaataaactccgctcagattgtgtctcgcagcgagtgtctggaaccttccagacaagcctcaggcgtccggtcctccagttggtgtggaaagcgtgggcgatcaccaaggggggtgggttggggcagatggagccggcgtgagtcccgtctcttcccttccttcccagaaaggcagccctggagtccatgccttgtcccgctctcaccggcaaaaagtataatcttattagaaataggaaagttccaaaaagcatcaatgagttaaaaagagggctgggcatgttcggtcatgcctgtaatcccagcactttgggaggccaaggcgggtggatcacccgaggttgggagttagcctgaccaacatggtgaaaccctgtctctactaaaaatacaaaattagctgagtgtggtggcgcacgcctgtaatcccagctactctggaggctgaggcaggagaatcacttgaacccgggaagcagaggttgcggtgagccaagaccatgccattgcactccagcctgggtaacaagagtgaaactccgtctcgaaaaaaaaaagggctggggccgggcgtggtggctcacgcctgtaatcccagcactttgggaggccgaggcggtttgatcacaaggtcagaagtttgagaccagcgtggccaacatggtgaaaccctctctctactaaaaatagaaaaactagccaggtgtggtggcacatgccaataatcccagctacttcatctgaggtcaggagttcaagaccagcctggccaatatggcgaaactccgtctctactacaaatacaaaaattagccaggcgtggtggcgcgcgcctgtagtccagctactggggaagctgaagcaaggagaatcgcttgaacctgggaggcggaggttgcggtgagccgagatcgcatcattgcattccaggctgggcaagcctaggagagaagagcgaaattgtgtctcaaaaaaacaattaattaaaataaaatcagtgccataggctgtttctggtaggcagtgggttcctagggtggagcagggaagggctggaaagggtcgcctgtgcccagcccgactccccgtgcttctcgggggacagcacggctagctgctgctgcggagcccacagtggggttctgggggggggggtgcaggcagaaggccgccatgcctccctccccctttccaccccagtgagagtgggctcgaaggcagggagtctgcccgccttgtggagcctccgcagaggcacccagggctgccgtgagcgcacagcctggcggtgtcccacggccctgccctttcctgtcacttccacctgttgcaaaacactgtgctttcgtatcttttctttctacctgtttggaaatgtgaaaatcactgctgccgtaggaaacgggcccagatccgggctgtggctctcccatccgcaccgcccccgcggtgtccagccaggaggtgggaggtgggcggcactcagtgtgcctggttgcggcgatgattggcagatgcttggacctatggtaaagaggattttcgcgagctgggagtcagtcctggactttgtaggtctttacatcccaggcggcctttatggggttccagcatctgctgaggcccctgcgccagccatgtgaggcctgggtgtcctcgaggcctctgtttgtgcccctctctgggcagcgggagggagagctctgagacccagagggagctcaggggctgggcagccgcagaacagcgggggtaatgggtccactgggggttctgggctgtgcacacagtgggcttccggtgcccagccagctggggcaggcctggaatgttggttcctctctcaggatctggggcgctgctgtagctgtcggggaatcagtgaggcggctggacggcccgtatatcccacaaacgccaccgtattgctcaaactggactcaattttcttaacacctttttttttttttttttttttttttttggagacagggtctcactgtatcgccgaggctggagtgcagtggcgcaatcatagctctgggctcaggtgaccctcctgcccccaaggtagctgggactgcagatgtgcaccaccacacccgactagttttttgtagagatggggtttcgccatgttgtccaggctggtctcaaactcctagactcaagctatccgcctgcctgggcctcccagagtgctgggattacaggtatgagccactgcttcgccacgttcacctttatttacttatttatttatttttgagacggagtctcgctctgtcccccaggctggagtgctgtggcacgatcttggctcactgcaagctccgcttcagcctcccaagtaagctggaactacaggtgcctgccaccaagcctggctaattttgtttttgtatttttagtagagacggggtttcaccgtgttagccagtatggtctcgatctcctgaccttgtgatccgcccgcctcggcctcccaaagtcctgggattacaggcttgagtcactgtgcccggcccacctttttattttttattttatagagacaagggcttgctgtgttgcccaggctggtcttgaacccctgaccttaagtaatcctctctggcctcccaaagtgctgggattacaggtgtaagccatagtactgggcctaaagttcaccttttttttttttttttttttttttgagatggagtctcgctctgtcacccaggctggagtgcagtggcgtgatcttggctcactgcaagctctgcctcccgggttcacaccattctcctgcctcagcctcccgaatagctgggactacaggcgcctgccaccatgcccggctaatttttttgtatttttagtagagatggggtttcactgtgttagccaggatggtctcgatctcctgacctcgtgatctgcctgcctcggcctcccaaagtgctggggttacaggtgtgagccaccgcacccggcaaagttcacctttttaaagtgtgtaattcagtggcatatagtacattgacagagttgcacaactatcacctctatcagcttccagaacattcttgttaccccagaaggaaaccccgtctctgtcagccatcactccccattccctccccagtcccggcacccacgcattcccttcctgcctctggattggcctgtcctgaacatttcacacgagtggtgtcacacaccgcgtggccttttgcgtccggcttgtctcacggagtgtgctgtcctcaaggggcatccgcgccgtggcctgggtccgaacctctctgctgttcacggctgcgtcactttccagtgtgtggagggccacgctgcgtttgactgctcatctgtggctggacacttgggctgctcccgcctctgcctgtgaattgtggctgctttggtgcacgtgtgctcagccggcgtccctctagaatccttgagggccttgtttcagccacatcaggagggattcagggaccagggcacgcgggtctggagctgggtgttcctgggtctccatgtgcctcccagtcctgctctgagccgtgggaggccggggcgagggccaggcccatctcttccctgtatgatctgtttctaggcagacggaggctcctagccccacctctctgtgagcttgagtggcgtttatgactctccttcctatttcctgtcctgctaatcaacaagtcagctaaacagtccatgctgcctgggcaagcccagtaggcccctaacgtggcacctcggagcggctggcgatgccccaagagccgggcttccccctcctggaggctcttcctgttcctcgccaagctcttaggtttcgctgggcctcctcttctgctctttttctggctggagacgtcagaggaagcctggcgatctagagaagctgatgtgcacccatcatcccggaggtgactgccaccaggcgggggtggctccacccccactcctcccctggcataaatcgggggacgcacgtgcctgcgcagaatgccttggtcccttttaattaaacagacaacccagtgtcccttggtctatgctgacctgctcaggagtgcctgggctcttccacgtttcagctgctgtgtgtcctgctgctgtgaagtgtccccgttgaggtggaggcagggcagggcgccttcggtgagggcgagtcctcctgtgcccgtttccccatctgtagaatgatggctcatggaggagacatggtgtcggcaggtggtggccggcgcagggaggtttccaggagggagtcctccaccctcatttgcttttagggccgtgcagcctcccgagcggcccccacgaggctctgaggctgcatgcaggttgagctcctggcctcactgcccctcctcagggttaggactgtgctggagcctgggtgggtgtggggtggtccctgcacaggcagcaggaggtgggccagagcggtgctggacctgaaggcccgtggctccctcagctccactgaggaggctggaatagtgtcctgggccaccttccctgccggtagccggctcctgctgagggagggggtgctttcgcctcctggtggagcatcaggctcttggggcctgtgcgtccgagcatctggcctctgctgtctgaaaacagcaccttccccgccccccggccaccgcatctcctctgaatagaaggcaagtcttgcctcccaggaatggcctgtgaccttcatcagcgggggaggttaggggcacacagagccctggggaacaaggggatctggggctgagccgggcctctcgggcccaccccgagctctcctgagcagcctggcaggcaggaaggcgctgggccccggggcctttgccgagcccagcctcaccctcagcgtccccctcaatgccctgggtgcctgccaggctgtggacacaggccctggccagttctataaataaccttgccgggccctgctgggaattggtgccaccaccacatagcccagagagaacggaaacacagggcttctcagcgagcagaccaggcctgcggtgaccagtggaagtgggggacgctttcagggctgggcagcccgacagggcaccgggcacagccaggggccggaaccagttgctcactggctccgcttctgggggactgtgtccctctgtgccccgtccccatcacaccttgctttcccttcatcctgctctcctagcccctccccagactggcggccccttgtccaggcccagccccagcacagcctgcagccctggcagagctcaggccttggccttctgaggttgccctgagggcagtgagcaatgagccctgggactggtgcactgggagggaaaggtgagccaaggcttcctgcaagaggcagccctgagctgggggtggggaaggctgggtcgtgggatacccctgacaccccaagttttttttttgagatggagtcttgctctgtcacccaggctggagtgcagtggtgagatctcgactctctgcaacctccgcctcccaggttcaagcgattctcctgcctcagcctcctgagtagctgggattacaggcgcccatcaccacgcccggctaatttttgtatttttagtagagacaaggtttcaccatgttggccaggctggtttcgaactcctgacctcaggtgatccacctcggcctcccatagtgtcgggattacaggcgtgagtcaccgcgcctggccccccagctgttttttatgctccatgcttgggcttcctgttaagaattaaaaaagaaaaaaaaaactatggagatggaatttacatactgtacaactcattcgttcacagtgtacaattcagtggcattaagtacattcacacggctgtgcaaccactacttctaattccagaacgttcggtcaccccaaaagcaagccccattcccattgtgtcactctccatcccctccaccagctcctggccactctgaatccacttcctggctctggattggcttgtcctggatattgcatagaaatgggatcctgtcggccgggcgcggtgactcacgagagcaagagatccagaccatcctggccaacatggtgaaaccccatctctactaaaaatacaaaaattagctgggcgtggttgcgggcacctgtagtcccagcgactcaggggctgagtcaggagaaatcgcttgaacccgggaggcagaggttgcagtgagctgagatcatgccattgcactctggcctggcgacagagtgagactccgtctccaaaaaaaaaaaaacaagaaatgggatcctgtcatcccagcgttttccgaggccgaggtgggcagatgacttgagcctagtagttcaaacgagaccagcctgggcagcacggtgaaactgtctctactaaaatacaaaaattagctgggcatggtagcacacgtctgtagtcccagctacttgcggggctgagatgggaggatcgcttgagcctgggaggtgcactccagcctgggcgacagggaaaccctgtctcaaaaaaaaaaaaaaaagtgcatcacacactgtgtgtcctttagtgtctcactgtgacatcctcaaggtgcagctaggctgtggctcgagtcagagcctcactggtttttgtggctgagtcttgttgagtgcgtggatgggctgtgctgatcctcgtctgtggaagggcccctgggtggttccacatctcggctgctgtgcgtcctgctgctgtgagcatctcgtgctccgtttctgcgtggcgtgtactgttcctcagggtgtgtacctgggagtggagctgctggctcacagggtaacagacctttggagaagctgcagacgcttccacgcccacccactgggtgtgaggaccttgctcctcgtcatttttgtttttgtttaattttttcttttatgagacagggtcttattctgttgtccaggctggagtgcagtagcacgatcacaggtaactacaggctcaagtgatcctcccacctgagcctcccgagtagctaggacttgaggcacgtacctccacacctggctaatttttgtatttttagtagagacagggtttcgccgtgttgctcaggctggtctcgaactcctgagctcaggtgatccacccgcctcggcctcctatagtgctgggagaaatgaagtgtctgcgacagggcggcagctgcagagggggctgtgctctctggcctgttgtgccccacccttgtgacaggcaggtgggcgtggccaactgggcggcagctgcagagggggcagtgacaggcgggtgggtgtggcaggaccccacaatgtctctttctgtggcgtctccttcttcgcctgccccttcctatgggccatccttccagctcacctgcggcccaccctccaaggagtgggaccctcggagttgggagcccttggctgcgtgggactgtactgtgtgacggagccatcaccagggctccaactcaccctggctcctgccacagtctgggctccatctgtgctaccattgcagtagtctggtttctaggaagcaaaactgttactgagttacaaagctcaattaagagtgtcctttgggaggccgaggcgggcggatcacaaggtcaggagatcgagaccatcctggccaacatggtgaaaccctgtctgtactaaaatacaaaaaaattagccggctgtggtgacacgtgcctgtagtcccagctactcgggaggctgaggcagggaaatcacttgaacctgggaggcagaggttgcagtgagctgagatcgggccaccgtgctccagcctagggacagagcaagactctgtctcagaaaaaaaaaaaagtgtcctaactgtgtcctccaaagccctcgccggccgatgacagactagagggcgctgtgctcccaccccctaccgccctgagcctggacgcgtggcccctgcagggccctttcccacagcactgtgaactcacagcttctctctagggaagggaggaggtacgccacttccacagggagatggggaggccgactccagggatccaggccatcatcctgacgttgggtcggctgatacacccctgtcctctctgtcccagggaaattcaactactgaggaggttacggcacaaaaatgtcatccagctggtggatgtgttatacaacgaagagaagcagaaaatatatcctttccggtgttgggaccgcggggcctccgtgggaggggctggggccctgggtccgcctgcctcgaggcctgctcctcttcccgtctccttgaaggagactggcacacgagggccgtggccttccctggttccccggaagtcagccattgtggcaatggctgcgcagcttgctgaaaggggccctgagccctggcccctgtgtcttgggcccgtggggtgtcaagtcccttttttctcagagtctcctcccaggctaaccaggggtgtagccacggtctgcctgagacaggccacgcgggctgaccgttgtgggccattttggtcgtggctgggcgtgtcctcgtgtcatctgtggacacccccatgggtcttacgggcacagcctccctacggggactttgcttcctaaggccctgtgcccagagcaagagccagaagtggtcctgaggctggggctgtgttccctgagccacgcggtcaggggccctgggaccgtcctgcatgggcccgagcctgcttgggggggcgtccaggaggcaccatcccccgcccatgggcagggtgggggacgtgagccccgcaggaacgctgccccaagagtcagccctgtcctccccttccccgtaggctccttcctcctgggacgctggggcccctgggccttttcagaggggtggctgagggcagggtgggccctggtcccgaggaggggcaaggtgggtgcagagggtccctccagagccccttttctggcccccgtgctccctgggcctgtgagtggggccgccccctgagctgtgtgtccttagcgccccacgtatatggtgatggagtactgcgtgtgtggcatgcaggaaatgctggacagcgtgccggagaagcgtttcccagtgtgccaggcccacgggtgcgtgcgcggggcaggggccagggtggggcgggggccgggggccaggcagggcaggctcctttccgtgaggccacactgcttgtcctgatattcattgacatgaaggcccaagtttttttgtttttttgtttttttgtgttttttttcgagatggagtctcactctgtcgcccaggctggagtgcaatggtgcgatctcggctcactgcaagctccgcctccgaggttcacgccattcttctgcctcagcttcccgagtagctgggattacaggcgcccgccaccacgcccggctaattttttgtatttttagtagagacggggtttcaccgtgttagccaggatggtctcaaactcctgacctcgtgatccgcctgcctcagcctcccaaagtgctgggattacaggcatgagctaccacgcccggccttgtaaaggcccaagtttttaaaaacagttttggggtcccccatgtgtggcatccacaggcagggctgctgccaacctcccgcctccatctttgctgggcctgctgcctgaggccagtggcctgcttccagcccatcgctggcagccgcctgccctgaccagatctcctggatgcaggtctgtggcctcagagtcagggccccttgctgctgcaggaccacaggggcagggaggggcctgctgttccagcaagactttggggtgcagccggcctgtggcccacaggaaaatgagacctgtggacatccggggccctgccagacgtggctcggccggacgagggtggccactgcaggcgcaggtgtggctccctgctggacctagcctttcctctgtcctgtgtgcctggacttctgtgacttcccagctgggcctgtggtgtttgggaggctcccaggcagctgcaaaggggacccctgtgaggggcagggaggcctcggccccaggacgggtgtgtgctgcccgcaggtacttctgtcagctgattgacggcctggagtacctgcatagccagggcattgtgcacaaggacatcaagccggggaacctgctgctcaccaccggtggcaccctcaaaatctccgacctgggcgtggccgaggtaggcacgtgctagggggggccctggggcgccccctcccgggcactccctgagggctgcacggcaccgccacaggcactgcacccgttcgcggcggacgacacctgccggaccagccagggctccccggctttccagccgcccgagattgccaacggcctggacaccttctccggcttcaaggtggacatctggtcggctggggtcaccctgtaagtgccccgcccccccgggcactcaccacacgcacactccgaggggcctctgcgtcttgggcagctgccggcctgtgggcgcagggcgtggccaccggcccagaccctctctggccacagccgctagggggtgcttactttatggaaatgtaactcatacggcagatggtggttcacccgtgtgaagtgcagcctggcccgtcagggatcttcacagagtggcacggccgaccctcctcccagagccccacagggaagctgggcgggtgacagcagctccaggccccttccccgggtgggtccagaggacactcccctcctaccccgtagcctccactagtggaaggtggtgaagacagaggtgtccttgagtccacagggcctctggtccagcagccacgggacgcctctgtccctggggtagagctggggctcctagggcgtcaaccaccttgactgaccacgcctttcttccctcccctcgaaatgaagctacaacatcaccacgggtctgtaccccttcgaaggggacaacatctacaagttgtttgagaacatcgggaaggggagctacgccatcccgggcgactgtggccccccgctctctgacctgctgaaaggtgggagcctcatccctctgcccgcagccccagggaggcggggcttttgtgcagaaatgtagggttgggggtgtcaggtggggggctattggccccgagaccccagcaggcattgagaggactgagtggagaggccgacctccccgcagggcctggtttgccaggtccctcagctccaccctgcttctgggccctgttcaccctccgaactcccaccccagagggcagtgctgccctgcgcctcccccagccccaccctcgggggctccctggcttgcagggtctgtcagggttgtcctgctgcacttcctacgcatggcagcaggtggcactggccgtccgtccatctgcccagtggccttgggagaacggaaccgccctggccgtccagcccagccctgtctccctgccagccgcgcacaggctgtccccggcatgtcccaggagtggagtggcctctgtcagggagaccgcctgtgcgcggggtcccccttaggagcgtccaggtatcacccagggcctgacaacagaggctgggcaggcggggacggttggtggggtctcaggcctgtgcccagctgacaggctcctcgccggcttctcctcagggatgcttgagtacgaaccggccaagaggttctccatccggcagatccggcagcacaggtgagcggcccctgggggcagtggggccgaggctgcagggaggccggccatgtgggcagctggttgagcgggcgctagagcagggcgtggtgggggtgccaggctgggctggggccagaccccgtgcagcgcccgcagttctcggggcccgagtggggtctctgggcagtgtcctgttaccggccagacccaggcgccttgtccgaactggggtctgagtgaggacatgcgtccgtccctgccctaggcatggagatgcgccaggaagggcacagctggtcccaaacactggcgagagcctctctttttcccctcctcctggggctcccagcagcagggtgtggctgggatccagcccagggcccccagctccatgacagggaagacagagcagcggacggggtcagcaggccccacagtgccgcctccctcacttcgtgggctctgctcctctgcaccagcccctggaggcccttgagccgtctgctggagcccctccgagccccgaggccacccactgagaccggctctgggagtgggagtgtccggacccctgaggcgctggtgctgattgtgccttgggggtctctgcacagctcgggtcatctgggcgcctggcggggactggggctgccccccgatagcctcctgggctgggatgtgctcagggccccccagacccccttctggcctttgctggctttgcagccagcatccatctggtgggtgctggcttctgagtgccacctgggacacaggcctcagggtggaggggacatctgtcaggcttggagtcaggtcagcctgcctgctcctagaggacatggctgagcttctgtggtcacagccaccccttgcacggcctggtcccagctcctgagtgtgtggcaggtaccctgggcccagaggagctgggtcggaaaactggaccgccctggtgccagcctgacaggcgccactgcttctgggcgtttgcagctggttccggaagaaacatcctccggctgaagcaccagtgcccatcccaccgagcccagacaccaaggaccggtggcgcagcatgactgtggtgccgtacttggaggacctgcacggcgcggacgaggacgaggacctcttcgacatcgaggatgacatcatctacactcaggacttcacggtgcccggtgagtctggcgggggcccctgcccggctctgctgactcggccaggatgtcccacgggagcagggtgcctgcctgtctgcaacaaggacagcttctgccctctggtggccaatcccacgtccccaaagcctccagcccacctgcaggctgcctccgccctgcgggccgctgggacatggctgaaaggtgtggggtcagcgggggcaccagcccaggcctgtctggccaggagggttcctcaggcgtctctccgggtgctgcccagccaggcaccacccaccggccttggcctgagtcccagcaggagcaggcgggggagccccagggtcgggggagggtaggtgagagtcagggtgcagggtggcccctcagacagctggcatgagagagggtccagtggccctccctcccgtcgtccctgaggcctgcccgctggccctgatgccggccgcccttcttccctaggtggcgaggaggcgtctgaggcagggcttagagcggagcgcggcttgcagaagagcgagggctcagacctttcaggagaggaagcctctcggccggcgccgcagtagtgcctgaggaggagctcagggccttagcgtaggggcggcccacattggcagccagcccctccccgccatgctcccggcttggctgtgttcggcccagggctgggccgtgtcataaagagttttgcagtgtatctgcagggtggatgcttgctgcgctcgggctggagcctgagggggctttctgctttactgtttcagcgggaagtggtgggcaggggccggcctgagaaggggggtacgccaggcaggttgggatgtgaggacccagtgcacagggtccacccccgggcccgagggtcccagaatagtgggggccctgcagagagccccccattaggtccctcagcactcctgggcccctcatcaaacccctaggctcagctcagtagctggtccccaggagagtacagtgtgggggcccccgagagcacagtgtatgggggtccccggggggtacagtgtctgggggccccccaggaggatgcagcatgtgggggccccccaggagggtacagcgtgtgtggggcccccaggatcacagggtctcagctcctgggctcttggatttgcagcaccacgaccatcgcgtctggtctgttggaacgggaggtgctgctgggtaccctggtcactagggtgtgctgggaggtgggggcccctcatggtgcccatccttggggcctggctgcaatttgaccccaggcccagggtcttctgcctttcagagccctggtgccctgagacgggcagccaggcaaatcccaggcaggagggccagttagggcagggccagcccaggcaggttgcgagagtccctactgggacgtggaccacacgctgacccccacggccgcccctgcaggccaggatccctgagccaggacccggcactggcttccctcctggggaccctcaggcctgtgtgagacctgggctgccctggggtgaggtgcctgggaggagagcaggggctgggccacctttttcatgaccctgctaagcccactgtgggtggtgaggaggagtacccagcagggggaagggccgccagaccactcggcatggctgaggcctcagtactcagtactgggtactcaggtggacgcccctcccactgctcagatgctggggacaggctcaacttcaggcttcagcgtgagccccgtccctgacctgcagagcccccttgcgttggggcaggacagcccggcgccctcgggtcaggccatcctctgcgctctgccggggctgctgcatcggcctctgcgtgcctccactttggcctcacgtgtccctacccaggatgcgggtcctgctgccaacacccagatcccagggaaggggcttgggctagatcctgggcaccagtgcagacaggagtgtggggtggggcaagggcccagtggcggctgtgcccgctgatgcagagctggggcaccttgtccacagggtctgccccaccagagacgggctgggcccaagctcagacctatgggtgcaattggtgcctcctcaccaaggtcttttttatctttttttttttttggagacagagtcttgctctgtcgcccaggctggagtgctgtggtgcgatctcggctcactgcaacctccacctcccggattcaagcaattctgcctcagcctcctgagtagctgggattacaagtgcgcgccagcatgcccggctaatttttgtatgtttagtagagacgggggtttcaccatgttggtcaggctggtctcaaactcctaacctcatgatctgcccacctcggcctcccaaagtgctgggattacaagcgtgagccaccgcgaccggcccaaggtgcttttttaaagctagtgacttcctgtgcacatggggtgggtgtgtggcaagttctggaagctgctgagtcagccactggtccattctcggagctggggctctgcactgggcacatgagctctggggcagcccggggcggcctcccactgacttcgcccgggaggggcctcggggatggctcggcagccagtgtgttcgcggagtcctcgccaaccaccacggctcctcgcagggacagtacgtgggcagcttcctgcactttcccctgccattgtgagaacagtgtccacctgggcagggtgggcagccccaggcctgtgggtttcaccagggtgctggtgatggttggtggctagcagggactgggggcagctgggggccctggcaggctgagctctgctccccgcgtggttctgtgctggcatttcgcgtgcctggcctgagcctggcccgagcctggccctcctgtgtcctcacagatgagcatgtggcggctcctgggcctctagaaccaaccatgggccagggtgccccaggggagcacgggagggtcctgccttgtcagcttgcctcctactcgtgaggttcctgcagtcagtacctgggtggggtcccacctgcggccatggcaggtgcaacagacgtggtggaggggacactcctgcccaggccatctgcgggaggctcagccccggggggtgcctcccagagctgctggggggcagcatttcaggctggatacacctgggcctgacccgggggcgggcatggcctgggcagcagctgtaagtgcgtccccgtggtgggggccagccaggtccctgtggctctggggttgcgcccctcagctcaggccacacttgccgtctccctcccaggacaggtcccagaagaggaggccagtcacaatggacagcgccggggcctccccaaggccgtgtgtatgaacggcacagaggcggcgcagctgagcaccaaatccagggcggagggccgggcccccaaccctgcccgcaaggcctgctccgccagcagcaagatccgccggctgtcggcctgcaagcagcagtgaggctggccgcctgcaggtggggcgcggcggggcccgggtggggcatgtggggacaacgcctggatgccacagccagccgtgagcatagcccgcgctagtcagtcatggtgaccgtcacgtggctgcgcgtggttgccatgtggcctttgggtggcttggccacgtagcgatccccgtggagggtgccgtctcggggcctggtgtctggccagcgtgctggtcatggaggcctacgtgtggcggggctctgggggggcgtgccgtcctcacagccacctctcagagtgggtgcattccgaggaccctgccctgggcctggcgccccctccccatgcccgcgccgcttccaggaaaggcttatgctgggctcagcccagaggcttttgagcaccagtgggtggtgggtggtggggaggggccgcggcctccatggctctgccggggtgccgcaggctctgagccagctgccaagtatggctgaggctgagtcgtgccggacgctgccctgtctctccctgtgtgcctgcctcctctcccagccccagccccagccccgggtgggagacggagtcccagaggtgtcagagacccttaagtcacctgccgaggatgcggggtggatgggggcccgaggctgaagcccctgccttgccacagcccctctcccaggttttgggggccaccgcctgagttacatgtctgtcccccaaatgggtgcccacagcccatccaccagcgtcagagcccgccaggccccactgcaaaaggccacacaatgtaccccgggagtgactcaagggtggccttccctggcctcccctgctgccccccaggagtccggtagccccatgactgtacctcagcttctccatcctcccaggggcccgcgggaggcggagaaccggtgcccaggctgacctcttccgtcttccttccaccctgcagcccgtgtccaggagccccgccaggtgcccgcgccaggccctcagtcttcctgccggttccgcccgccctcccggagaggtggccgccatgcttctgtgccgaccacgccccaggacctccggagcgccctgcagggccgggcagggggacagcagggaccgggcgcagccctcccccctcggccgcccggcagtgcacgcggcttgttgacttcgcagccccgggcggagccttcccgggcgggcgtgggaggagggaggcggcctccatgcactttatgtggagactactggccccgcccgtggcctcgtgctccgcagggcgcccagcgccgtccggcggccccgccgcagaccagctggcgggtgtggagaccaggctcctgaccccgccatgcatgcagcgccacctggaagccgcgcggccgctttggttttttgtttggttggttccattttctttttttctttttttttttaagaaaaaataaaaggtggatttgagctgtggctgtgaggggtgtttgggagctgctgggtggcaggggggctgtggggtcgggctcacgtcgcggccgcctttgcgctctcgggtcaccctgctttggcggcccggccggagggcaggaccctcacctctcccccaaggccactgcgctcttgggaccccagagaaaacccggagcaagcaggagtgtgcggtcaatatttatatcatccagaaaagaaaaacacgagaaacgccatcgcgggatggtgcagacgcggcggggactcggagggtgccgtgcgggcgaggccgcccaaatttggcaataaataaagcttgggaagcttggacctggccgtctgggttttgttcgcgtctcaacgtggatggggcggcagcggggcgggcgccgttgacatgcggagggcagtggggactcggggcgcgggagggccggggccggctccctcagggccggcggcagcagcggtggcggcgcggttattgctcggaggcggcgcgggctgccgccagcacacgccgcagtgaggtaaacggtctcggaggtcggcagtcacggtgttgagccgcctcccggcccagggcggcgaactcgtctgcgaccgttagcgccccgcggcccccgcccgggcgagctcgcgcacgcgcccggcacgcggcggctccatcgggcccagtgggctgcgcgaccctcgggtggcgggccctgcgactaagcggccgccccgtccgggactgagggcgagtgatcgttgtcctcaggagcccgaagctgagagccgttcacgccccttccttcccgcccagccggggtctccgcggcccgcgcctcacgacgcccagcacccggcaagcaccggaaagagcagtgcacacttcggcggcgcgagggcggccggggctctgcgcctgcgccctgaagcggcgagcgcgcctccgtcgcccggcgcgtgcgcgaagggcccgcggtccccgcgcattcgcgtcggggcgtcgcgcccccacgtctctcccgccgccgaggccccgtgcggcgccggagaagctgccagagagatgggcccaggacgcgggacttaggccgggctgtggtcgggggacgtgggggcggcggcgaccaacgcgggagtcgccacgacgggctcggcgaggcgcggcggaaagagtctctcgtcgaggccagccgccagcttgtccagcaccgacccggatggtaggacgcacaggcccgagccggggcaccccccgccgcccggctcctcctcgatgacggggatggcggggtcgtcgccggcgccgcccagggtgcgaccgtcgggcgggccgtccacgctgtcgccgcgccgcaagggcgcacgcgcgggtcgggccgcgccggcaggcggtgccggggttccggccagggccggggccgcgcgggcgccggggtcgctgtgctgccggccacgctgccactgtttgcgggcgtgcgggtgcgcgcgggcgcggtgtcgcgcggcagccggcgtgtcgtcgaagtgcgggtcgtggcgcaggaactcgtggaacagcgcgtccgtcttctcgtcgatgctgtagtcgcggcgcgggcggcggggccaggcgcgcgggctgcggggccgggcgggcgcggcaggtggctcggtgtcgtcgcctgcgccgcggccctcgatgctggcgtagccactgtccatctgcagcagccggcgcgcctcgccgtccttgggccgcggcgcgggcggggagggcggcgggaaggcgggcgccgcgcccccggagcctgagcccgagctgtcgccgctgcgcaccgagtcgcggtcgttgccgctgctgctgtggtccgaggcggccgcatgcagctcaagcgaggcgcgcaggctccacaggtcgcggtagctggtctgggcctgctcggggcccgcgtcccgctcggcgtccggctccagtggcggctgctgctgctcaggccccgcgctgcccgcgccgcgctccgggggggaatcggggctcgctcctcccgctgcctcggccgcctctagcctgcaagccaggccgcgccgtcagagccccgccgagccccgcgccccctacccggccggccatcccgcctctggatcagggagggtggacgcgggtgggacttgggactcgggcgggccttggaaggtgagagctttaaaatgagccagtgtgttttgcaggggatgcgtcttgcattgaccctgagctgtggcgcctgcttattaagcagggtgcctccatgctggactgcagacggcggggccccctcccttggaagcccccaggaaaagtcaacatgcttctctccgggagtcacgttttcccagcctcccagtggacgtgggagccgcaggggatggactggacgcggttgagtccagctcagcccctgctccaggctagggctctctgcccacccatgctggataaccagcaggaggacagtgcacagacgtgagggtcacccgccataccagggctgccccaggaaccctgctctgccccagccccacgccccattcccatcccaccgacgtgggccctgggcttcagggaagttgcccttgggttgggggaggggtgctgctggccggagtggtcacagcagcttctgagaggagtctgcccagccttgggagcatgggcggggcgggggtgggagagggcctgggaccacagcagaacccttcaggcctcggactccaccagcaagcagcagtaccagcgccatcctcggggggcccctcctccccacccaccgccctacccttacccagtctctccctgcttccctcctctggtccatgctggagaggtggccccagtgagtccgcctctgggaggggccttgccgctggaggcaggcgagcgcgtgtccacggggcctggagagcgctccctgggccgcctaggggggggcgaaggggggcaagggcccacaggtccacccctagcacctccatctactgaaaaatacctgccgagagcagggggcgggctggccagaaaggggcgggggtgcgggaaggccacggcgtcgcccgcccgggcaatgtactggatgaagtcctcctggggggcatccccctcctcctgctccgtgctctcactggctgcccgctgccgctggaagtggtgccgcttgggggaacctgcgcacgggatgtgccgtaagcgtcagccggcatgtgcctccacccgctccacacacacacagaatgcctatgcccccccgccacacacacacaatgcctgtgcccccccgccacacacaacgcctgtggacccccaccacacacacacaacgtgtgccccccacacatacaacgcctgggccccccccacacacagaacgcctgtggcccccatacacacacatagaacgcctgtgccccccaccacagaacgcctgtggccccctcacacacacacgcctgtgccccccccacagaacgcctgtgcaccccccatgcctgtgccccccccacagaatgcctgtaccctcctacacacagaacacctgtggcccccacacacacacaacgcgtgtgccctgtctctgtctcacacacacaggagtgggccctggcttgggccagaccctggctggcatctccccgggtcaggtgggtgcggacagtggctgtgtgtacaccctggagtacaggtgagaaaactgaggcacggagggaagaggtgctgggaccagagagcctgagcagggcagggccaggaagcgagtgagtggaagggcctctggcaccgatagtgccttgtggcagccctggtcaacatgtggccactcataagggcgtgtcctggacacctggtggcctgcacagcctggctgaaactacggaaggcatgagagagtcacatacaggctggtgggggccaacgaggagagggagagaggtgccctctcctgccagctccaccctggtctggagagcgctgggggactgccccacccctgcctcggcccccttctcccaacagcctccccagcaaagcttgagtgggcaggccccagcaaacaggttctgggatgtgctgcaaccacattggactctaaatgtctctagtcacccctgggccccattcatttcaagatctggattctctcagctggagcggggcagccagaggaggccttcccctccctggcccctagctaccttgggggtgggggctgggagaactcaccccacccccgctggctggagccacaacacagggtctcccactgtctgatgatgtgtcctctgtcatgctgacagcaccttctctctgcacttgtcccctatcctggcctcacctgacgacaggacctgccaccctgtccacaaggcagagcgggccccagcccctctgggctgccctggccctgctgagctggctgagcagggctggtgcctgctgccagtgctacagatgggacacctctgctccccacacaaactcctgcctcgagcccagataaggcagccctgtctccaggatcctgcctgacccaaggcctgcagaattgaagggctactgtcaaacagtccagggatctatgtgctacagcccagagggcaaaagcaccccctgccccggagcttcggtaagttttactggcacacagccacgtgcattcgtcatgcagcgcctctgactgcttcctcgcctcaacagcagcagagttgtggagacacagcctctctgaccataaccccacgaacaccaccatccggggcctgatgggaaaagtctgctgacccctggcccagtccaacacttacttcgtgttagaggaagtcagagcccagacaggcagagggcctcggccaaggtcacacagcagctgatggtctgccagcgggcgagggaggggccccgggggaacccgccttccactcacattcccagggatgagagccgagcatggctgggaggggatgcaggccacaggccccaccctctgcgctccacagtgaccaggtggcccccgacaccctcctttaccacctcatcctggatgccccaatggcccgagagcagtcggggcgcgcaaagccttcccgcacaggttcccggagctgggtgggtctggctcaggccgcccgcacactcagccctcccagccacctgcagaacctcaggcagcacgcccgctggcagactgggcaggactcagccccagagcaccggctccccacccagcccacaacctcctgctcctggatgtccagggcagcccctggcagccagcacccagcccacaggggcccactctccaccaggtgctacagctcacctctcgtgtccagactggctgcccgctggctgggctccagcttccacttcttgaccttgaaataggggctggccccatccaggctggcatggcggcgcaggcgggtgaggaactgcagaacggtacctgccccggatcccgggcccgcctccccaggccctgctgcagccccgggccctccagccttggtgctcctggtaccggcatccaactggcagggaacagagatggcgctcaggctaagacttcttcctgggcccgtgtgctggccccaggtggccgtaggtctgagagacagtcccaagggccccccatcactgggacagagaggggtacctgctcggagaggggcagaagcgggaggaggggcgctcagtggctgggtgggctacactaaggtgctctgccctctggggaaggtccctggatatggggtttggagagaaaaggaggtgcgtgtctagaaggtctctcgcccacggcgtgggctgcaggtgagggagggcaggggtggcgcaccctctccagaacctagggaatgtcaaatgaggtgggagcctggggtgccccctgcatgtgtgaggacacgcctgtgtccggtgtgcggccggctccctctttctcccgtgtgcaatgacccggcgggccaaggagggctgcggtggctggcaggtcataggttgaccttggtcctggactggggacagggaggggaaggagcctccccggctgtggacaccatgggggacacgcaggggccctcaccgaggtgccttccccagagtcgctagatgccgaggggctgatctctgcgaagtcagtggcgcccgcggctgagttgtaggggtcacctggcagggcggagctggggcccacagagcggccggtgagggccttccccgggggctgtgggacagagccaggtgggggaggaagcagtgacaggtcaaagagcatgggtgggtgagggacatgggcaggtgaggagcatgctgggcttggccccctgccctgctccaccccaccccgcccatcccgagatgagggccacccagaaaaagagtgggtgagggcgtgggggtccgggagtccccggggctgcctcccgtcccccgaggaaccggggctgctgcccataggctcacctggaagatggccagagtggccttgggagaggtggccgggtggggcgtggtggctgagctggcctcgcctgagtcacactcgtggatggtgacaatcttgaggggcggcaggtgcaggtgcgtgagccgggcattcttcaggtggtggaagtccccctccgtcagtgtgtacctgcgacagcatctggccatcagagcccgcccacctcccatgcccgatgccccagctgccgtgctctgccatccaccctgccggcctgggcaggggcaggcgaaaggggggcaactggccaaggccgccccaccccacggtcccagtccaggagcctctgccttggtccctgcagcctccgcacccagctcctcccccgtcccggcggccaggacctcagacaggccctggggtgcctcccaacgccgccccgcttaccggcgacccttgtcctgcgtcttgcggctctgctcaaacagcgccgcctcattgaaggagacccggcggcccgtggagctggtggacaggaagcgttcggtctccgcatcctggcactcggggtcctctccccggaagtcggggtctgcgtggagaggcaggagagggtgggccccgggcgggccacgccaggcgcctggtcccgggagggctgctcctccgggcggccacggcagggagggctggggccgcggcacgggcggccgggctggcggggcgagggacactcgtccatccgctcacacactcactcgctcagcacgcgcctgggcccacctacgcctgggcgttaaggaaacagagatgagtcggaatcgagctgcgcccagtctggtgggggagacagacagacacagacggtcaggcagcccgagggggcggcgggtggccgaggggcggatggacaggcgagcgcacagccaggctggccagcacctcaccttgggctgggtgggtgccgttgtccaggtaggtggtggtggtcttctccgcttcctccatggccctgggagagacgttgggagagcccagtggcacggagggcccagatagccacagtgggtctcggctctttgccccaagccaagccctgcgcatcacccagtctccagaggcatagcccaccctgtgactcagaagccagtgaggtagaccccccaccacccgatggcacccacaaccaccatgcacctgcccagccgaggtgggggcctcgcacctgttgaggcgctggtggacgtcccagcagcgcttgcagaggagcaggacgccagacaacaccaccagcgtgccccccacgaacagcgacatcaccaccaccagcagcacgtagttgtccaggatggggtctggctctgcctgcgggtgtgcagggggggtcaggtgctgctggcctggacgacctcctgcccctcccacctgtcccctgcacccaccgtggggcgtccagtggcattgtcccacgacgtcgtcagggctactgtggcagtggtggtggtggtggtggtggcggctgtggccatggtggctgtgggctgcattctgaactggggaggagggccctgtggggaggaagcctggtcagctccagctagacctacttctcctgcaggagccactgcagacaagctgggtcttccctgcaggagcaggagcccacacagggggcagtgactcatggagaggtagcagagccggaggcagcctccacccggcttggctctgcccagcgggccccgggggctctctctggacctccatctcccatccccatggcgggggaggaggcctggccctctgagggtgcgcctgtacccatcacaactgcacacagccggtgcggcctgtcctgcaaggtagcgccaggccctggagctcagcgctgggcagggcaagcactcggaggaatggggacgccaaggcggtgcagccggctcgagaaggactccagacgccctgtccgccccatcacgggggtggggggctacccccaccccaagaagttcagctacaccctggcagggcccacccggccatggttgggtagagggagacctcccgctgcctgcgcgccagggagggtgcaggggctgggcgcgtgctcccgggtcacgactccgggaggtggaggtctccccggtgctgagtgctggtgggagtgcaagggacaaagaaggcgcatctgttcccagccccggagaagctggttcccatggcgactgcggagcaggccgcggctgggggggcgggttgccagggagcggcggggagggggcgcgggggcggcggcctgggggggggcggcggcctcgggggggcgggcgcgaagccgcaagatggccgcggccgcctccccgccgtgcccagcccgggcgcccggagcatccccggccgccttacgctcgggggaaactgaggcggggcgcggcaccagggaaaggagccgcctggacgctgtgcggcgcagccgggtggggaggcccgggaatcgcagggggtcggggctggcgccggggtgctcggcggccccaggtcagcaccgcacgcgcgagacctttcccggagcgagaggagcgcacaggcggcagccgctcctgcccttcccggacttccgcccacacgcgacagcgggaaactgaggcccaaagccgggcagggtcccggcgggggctggtgtcctcagcgctcccggtcacaggctgcccgggccctggtactgggggaaggggccgcatatgtaggtcgggaaatgagttcaggctggagggggtggggacaggcgcaggatggtgaccggaggccggggaagatggcaggaggccgaggggaagaggggggctcctgggggaggcggctgcgggagccgagggcggaggttccccacggggcagcaccgcgcccccgagccggccaagggtggggatggcgagccaggggaggcagggacccgacgccagggctgagccgagacgccatcgtcctcgcccgacctcacagggagaaactgaggctggggcggggcctgagcgggggtccctctggaggcagccgggtggggggcgcaaggcccggatctcggtccccacgcccgccggactcctccgcgccctccctccggccgcttagcccacagccggctgcgatccccggcctgtcccccgtccgccccccgcagccccgagcccgccgcgcctacctcagcgccgggacgagcggcccatgggcggcgggctggcggcgggcggctgcgtggcgctcgcggctggctccggcgcccggtggccgcggagcaggcggagaatttatgaatggagagcgcggcgcgggggaggccggcgcgagaggaggggccgcgcacgtgaccgcgttggcggcgcgcccgctccgcgcgcccggtgctgcccggtccccggcccgccgcccccgctgcgctcgccgctgggtctggctggctccgcgccggccaccgcctccccttcccttccggcggggcggggggcggagcctgcgctcccgggcgcccactccgcacgcggagccgccccccgcacccgccgcggcggccgagccccgcccccggcccatcggcacgattcacctcgcccggtcctgaggtcccagggacgcagctgggggtgtcctggaattcacgactctgcagcccgaggtgcgccgcgtgcgcaggagggggtggggtccgggggggcacggactcccctctcacgttgcttggtccgtgggggttctggggcggcacagccagggcccctcggccacaattcccctttaagctgcacagcccagggtctctggacacaggcgccccgcctgcttccccacgcaggtcccctctggcactgtggaggactcgccatgcctctcctgccccctcccctgtgtgacagcgatcacagaccccggcacaaagctgagcagagcccatcggggcccaaacgtgcactcacagaggcctgctcctcgtggggtgacatcagaacgacacccgcagaaacccaaagcccaaagctgcccccgcttctccctcttagaccatcgaacctcatcctgcagatactcaggccacacacctgccaccagcctggcccgagcgccaccccaacccctctgagcccacgcctaacaccccacagcgcctcctctttctcgtcccaaagaaaggctgacaccgctctggcacgtggctggcccagctcagcctccccgcctctgcccttgcaggtgccctgtacccaggcctctgtccatgcagccagagattcaccccggtttccttcaactccttccccagcttcacagtctcggcgcttctgctcttggcttccagcccatgcctgggtcccctcctctgctacgtccctccaaggccctatgccttgcgccttgcctgttcctgtgtgctgtggggccaccactccgatagctgtgaactccaagggcagccccagggaacctggtgccaggcaaatgggaattgcatgggcaaaggttttgaggcaaaaaagtttgcaagtcaatgcctgtgaaggaagcagagaaatcgtcttgttcccagcaggaccatgacatgggcaggcttcagggttttttgtatttcggttttgctttttggagagacagagtctcgcactgtcgcccaggctggagtgcagtggtgtgatcacggctcactgcaacctccacctcccggattcaagcaattttccagcctcagcccggaaggtagttgggactacaggtgcgcgccatcatgcccagctaatttttgttttgtttttttttgtagagatggaatcttgctatgttgtccgggctggtctcgaacttctgggctcaagagatccttctgtctcagtctcctaaattgttgggactacaggtgtgagcccccacaccccgccaggtttctgatttttaataaagactccctctggctgtgtgaagaaaaggtacctgtactaaacggggggaggctggggcctcctaggcaagagatggtagccgcggtggccatgctgggtgcacaggccgggacagggcggaattccagaggaaccccaggtttggggctggagtaatggcgccctcacccgtgggcgaccctggagtggggactggagggaagtggttccacgagtgagactgagtctattaggcctcccagtttcctggagtggcagctggatatgcggtcctgagagccaggaggtgcacaggtcacgactcgaaaagtgaacaggcctcctcctctgcaccccccgagccagggccaggatgaccaggctccaagtgaccgtcacagcgctggcccggtgggaggagccaggcccacgccttcatcctgagtcggaccagcagggccttcttcaggtgcttgggttccaggggacagtggcgcccgccattgcactggcctgaacacgggcagggggcgagggtgcagcctccggatgtagggagccacggatcgtgtcggattcgcccacagcaggaggcattggatctccctggctgcacccttgtaaagccacagccccagggcctcccctgctccctgcacccctggggtccagcccaccgcgccaggctcaaggccctttccagggagcccgagccccaacccccgccatccccgattccgcattttcccggagcctaaggagcggggctgggggcccggccgggtgccgcagacctgcgtgagcgcgggggcggggcggtgacgtcatagccgcgagcgaggctgcgcgggccgctggctgacggcagcggagccccgagccgcccgcgcacgcgctcctgcgtcagaggcgcacgggggcgacggccaggcaggaggtggggggtcggcgagcgcatctccgggcgcggagcgccctctgccggcgtcgaggagcagcgcgccggggtccgggatccccagcgagccctcccgcgtcgcccgcgctgtgcccctcgccgcggtcgccgtttcctagaacagctgcacctgcagccttccaccctgtcccgtcctgcacactttctcggcttttactgtgatttatttttggcttttgccaccacctaccactacgacctgtttgtttttaaattttatttatttttttgtttgagacagagtcttgctcagtcgcccaggctggagtgcagtggcgcgatctcggctcactgcaacctcccccccccccccccgcccgggttcgagctattctcctgcctcagcctcccgagtagctgggattacaggcgcccaccaccatgctcggctaatttttgtatatttagtagagacgaggtttcgccatgttgaccaggctggtttcaaactcctgacctcaggtgatccgcctgcctcgccctccagatcggataaagtgctggaattacaggcgtgagccaccgcgcccggcctgacctgcttattaatgatctcaaatgtctgctaaataacccccggccccagagtgggattctcactctgttgcccaggctaggcagtggcgcaatgatagctcactgcagcctcaatctccttaggcccaagcgatgctcccgcctcagcctccccagtagctgggaccacaggcgtgcatcaccacgcccggctaattttgattatttgtagagacggggtctccctctgttgcccagactggtctccatctcctggggtcaagtgattctcctgccttggcctctcaaggtgctgggattacaggttggagccaccacacctggcccagagccggaaacttgatgttttcttgatgtctatccagggccctgcatccaatgagcgccccaaaaatctttttttttttttttgtacagacgggtcgggggtgggggcgatctacactattgcccaggctggtttccagctcctggcctcaagtgatcctctggcctcagcctcctaaagcgctggtattacagtcgtgagccaccacgcagccgaatcttgaatttcactgaagttcgttttactccacctcccaggacggtttcaccgcccttatctgaccaccccctggttctgccgcagcccgggccggaacaaaactgcaacccccagaatacctcacgacggggcactgcgtcgtcaacgtcgcgtgcgccctgccgggagtcgtagttcgcgcttgcgctctcgccgggactcctcctcccagacgtccctgcgcgtcgtcctcctcgccctccaggccgcccgcgccgcgccggagtccgctgtccgccagctacccgcttcctgccgcccgccgctgccatgctgcccgccgcgctgctccgccgcccgggacttggccgcctcgtccgccacgcccgtgcctatgccgaggccgccgccgccccggctgccgcctctggccccaaccagatgtccttcaccttcgcctctcccacgcaggttcgggcgctgcgggtcgggaccctccgtggccgccgcccccggagtccagggtccccacccccagggcgcgacccccgcttccgggcccccggacccgcgcgccccggaagccgaggctactcagccctggaccctcggccctgcctctgctgcccgagccctgcgctgccctcgtcccgggcacctccccgagataagcgtctcctgggtgccctccccgatctccctggccaaagcctgggtgtcgccggatcgttgcattcccatttcgcggatcagtagaatgaggcgcaactgttgaggaccaaagctgcaacttcggatccctgcgctgggttgtctcagtgcctcacatcagcgccaggtcctgccctgacccattacttagcaggacaggccgagtgcccggtgggcgcggggccggcctgccccgccatcattccccacgctgttgtctgcaggtgttcttcaacggtgccaacgtccggcaggtggacgtgcccacgctgaccggagccttcggcatcctggcggcccacgtgcccacgctgcaggtcctgcggccggggctggtcgtggtgcatgcagaggacggcaccacctccaaatactttggtgagtccggtggagggctgcagggccaggccaggctggggctccacatcccaggtcagtctccgtctcagttgaggctgcgagaaaaaatagttttaggccgggcacggtggctcaagcctgtaatcccagcactttgggaggccgaggcaggtggatcacctgaggtcagaagttcggagaccagcctggccaacatgatgtaaccccgtctcttctaaaaatacagaaaactggccgggtgcggtggctcccgcctgtaatcccagcactttgggaggccgaggcggggggatcacgaggtcaggagatcgagaccatcctggctaacacggtgaaaccccgtctctactaaaaatacaaaaaattagccaggcgtggtggcgggtgcctgtagtcccagctagtcaggaggctgaggagattgtgccactgcactccagcctgggcaacaagagtgaaactccatctcaaataagaaaaatacagttttagcaggtttgtccactgaggagcctgggctggccggtgatgaaagcgaaccagaggggaccctgctctcagccggtttatgactggctctggaccaaccaatgtaggatggtcgaagcaagagatgtaaaaccacccaggcccagtggttcatgcctgtaatctcagcactttgggagactgaagtgggagaatcgcttaagcccaggagtttgagactagccttggcaacatagtgagaccctgtctctacaaaaaataaaaagaaactgaccaggcgaggctgggtgcggtggctcacacctgtaatcctagcactttggaaggccggggtgggagggtctcttgagcccaggagtttgagaccagcctgggcaacatagtgaaatcccatactacaaaaaattagctggttgtagtggtgcacacctgtagtcccagctactcgggaggctgaagcaagaggaccgcttcagccggggaagtcaaggctgcagtgagccaagatcatgccactgcacttcagcctgagcaacaagagtgagaccctgtgccaaaaaaacccctcaaaaaaccatgttgggagggctgatcagattaggggaggaaggtcatttgtgcaggaaaaaaagcagttctaagcctcactggtttccagtggtggccagatttgaactcagcttgcctttggccctgaccccagctcaacccatgggtggtgggtcagagggagggcctctgtccccaggcagtgcttttgggggttcctccagcttctagtcctttcttgcggcccctgttttgttcttctctagcagttgcccgccatgttgggcccagggccagtcctgtgggtctgtttgcacactcaggacacagacttggatgtttgtggagctcctggttcacagggggctctggacttgaccaggggagtccctgaggctgtgcagccctttggggtctcacgccttccccccgccccattcccccagtgagcagcggttccatcgcagtgaacgccgactcttcggtgcagttgttggccgaagaggccgtgacgctggacatgttggacctgggggtgagtgtcagaggggacctgaggctcagcaggttggagctgtccaggctgcgggggagggagcgctgggggaccaggagccgggctggggtcgctgctggcccctcaccgcccctcaaccccttgcaggcagccaaggcaaacttggagaaggcccaggcggagctggtggggacagctgacgaggccacgcgggcagagatccagatccgaatcgaggccaacgaggccctggtgaaggccctggagtaggcggtgcgtacccggtgtcccgaggcccggccaggggctgggcagggatgccaggtgggcccagccagctcctggggtcccggccacctggggaagccgcgcctgccaaggaggccaccagagggcagtgcaggcttctgcctgggccccaggccctgcctgtgttgaaagctctggggactgggccagggaagctcctcctcagctttgagctgtggctgccacccatggggctctccttccgcctctcaagatccccccagcctgacgggccgcttaccatcccctctgccctgcagagccagccgccaaggttgacctcagcttcggagccacctctggatgaactgcccccagcccccgccccattaaagacccggaagcctgactgtgtgctcggctcttgttcctccacctggcccggtgaagccgggagcgtcctgggcccctgctcacgtcctccatgtcccttgcaaatagggcctttgagctcccctggactatgtcccttagggcacctggaggtccgtaggaagcaggctcgagggggtgggtggggtgcagccaggcgggcaggctgctgaccttcaccctacaacggtggggagggtgaaggtcaccagtgatggggacatcggtcagggaggggtgtccctgctgctcctggcgcctctgccgagttcctggtctccaggccttgaccctgagccctgctggcccttggccctgcccaccagcctctggaaagaggcgggccccacccgctcccacgctggccccgccctgtgccagccggtcctgtgggtggccctgcctggccgggtgccgaatctgcagtgtttttggcacctccgtgggcacctaggcttctgggttggccccagatggagtggggtgggcccaggagggggcggctccctggcactgccccgttgggcctgcctcttctcctttccataaccctgggggcgggcaacactggctccagctggtgtgtggacggcgggggctggggtctcctgacctcctcccttccttgggacagggccctgtgcagtggggtaggcagggaattccaggggggtgagtggggagggtgggcctgcctgtgtcactggagctgggatggtgacagagaggccgccccgggcctgtcagcacggacgggcagctcactcccacgtcatggcactatgcgggtgacttgccacagcttcacttgaggcgaggtgccgttgggggccttgcgactctgaggccgccggtcagcagatcaggtattctggaacagcccacggtcccctgcctggctccccctccacttgggcctcgggacacgagtgaccaggcccccacttctccaggaatccgcagcccagggaaggttgtgtcagccaccaggccacaggagcagcctctgcccaggccccccctcccccccgcccccagttccagccccaggtcttcaagttcctgccaggccaccaggaccctataaataagaccaagggcacagctgggacttagcaggggcccagcgggaggagctgctcactccggggacctcccctgcccccaccaccagggagggtgtgaaccttggagccaggcctcaggacacccgagacacctgacactcggagggaacagcccgtgctggctggatgcgtcctggagcaggaggcagtcagggtggggccgggaaccaggcggtcaaggcccttcagtgagggcagcccctggcttagtgaggcagaacagagcacagggtttgtccccatcacacccaggaacaacccactcaaccatggggacgccgagtatgggaaatggtggggaagcgttttagcatgtttattcatttagactggctctgggcatctggtccccaaagggccacacagtggcccctgtgaagcccagcaagttccgacaacccgtgtcccattccactcccgaccagactgaggtgatggtgtccattccactcccgaccagactgaggtgacggtgtccattccactcccgaccagactgaggtgacggtgtccattccactcccgaccagactgaggtgacggtgtgcaggtggcagagccacacacgagaggcaagaggcagggagggaggtgggggctgctggccactcacagggggccccagtgtcctgcttgggctgctcatttggcaccagtccacggctccctccgccacctttgttctcactggaagcagaatgagcctggccctgtagttcccacctggggccccagcccttcatccaagccccattcatcgaccctgcccctcctccctccaactgggtccagttcactaagctcccagaactgctcaagccattcccacttcctggaccatcgtcttttttttttttttttttttttttttttgagaggagtttcgctcttattgcccaggctggagtgcaatggcacaatctcagctcaccacaatctccgtctcccgggttcgagcaatgctcccgcctcagcctcccaagtagctgagattacaggcgcacatcaccacgcctggctaatttttgtgtttttagtacagacagggtttcaccatgttgatcaggctggtctcgaactcctgacctcgtgatccgcccgcctcggcctcccaaagtgccaggattacaggcatgagccaccgcgcccggccttttttttttttttttttttttttgagacggaatctcgttttgtcgctcaggctggagtgccctggcacgatctgggtttattgtaacctccgcctcccgcgttcaagcgattctcctgcctcagcctcctgagtagctgggactacagacacatgccaccatgcccagctaatttttgtatttttagtagagacagggtttcaccatgttggccaggctggtctcaatctcttgaccttgtgatccgcccgcctcggcctcccaaagtgctgggattacaggcgtgagccaccgcgcccgaccgcatcatcttttttatgtgacaaactcctagtcattcctcaaaccgcagcccctgtgacccccttccaagggttatcccagcctctccctctctggcctagccctgacccttcggggctgggtgtgcctgtcaaggtgggggccacggctgccgggagcatgggtggcagccggaaggagacctggggaggagcgcagccctgggaggggcgcccatggccagggtgggggtggaggtggtcaggccagataaagggaggggccagatgagtggacaggaggtgctcccgtaggaatggggtccccttctctaaatagaggggcaggacggggcccacctcaaccaggaccatcctcaaaaagccgacggggaagggtgagatgcacaccacattcgtgtctcattggctgtggcctcagtttcttcatctgtaaaatggggtaatgcccaccccaaaggctgggaaccagtgcatgtcctgcattaatggggggtgatggccccaaagtgatcctgccgcatcccctcaccacactcccacccaccctggagaaactgaggcttggagaggccagttacctcccggggtcacagcatagccggctggtgactggctgggcacaaggcaggcctggcactggctaatcgctccataaatgccctctgaggtcaccattgacagatgcaggaggccagggctggccagggcacccccactctacggcaggtgactccagcctgttttcctggacgacagccgctgactcaggcccctcttcccgtcccccccacgcgggcgcccccaggcggaagcaccgggcctggggcgacaggaagggggcggggcagcgagtcgcgctgtacaccccaaaaccctgtcccgctgacgattcggggtgcatctcagcccgcggcgaggcgggccgagacccttggctcggggcattcaaggggagtccccccatgaactgcgccaagcctgggtcccgggtggcccagccgtcaaggcgccccagggccagggccggcaggcaggggcgggggccagtctgcgtcaccgcccgcccggccccccgcccccctgcccgccctaactccaccccgagggaaggcggcgcggataaaggctgagggccgcgcgcttggcccagaccggcccggccagcgcgcattcggccccggacgaaggtactcgcagcacttggagcgcagaaccggccgcgcccggtgagtgtggaggggggggacctgcgggccgaggaagggtgcccactctagatggctcaggatgcccgcacttttctttgttcttgggacaggagggatcggggagcctccggtcctgggaagccccccggggtgcggggtgggaggggctccgcgcagccagcgccgccctggccggacctcagcccccgccccgccccccggggcactcccccttcaccgcgggtgaccttgaactggttgccgttccgccctccgttgcccagccacacggtcccagtctcccgactacagtctttcgttcccgatcggggttcctcccccgcgcgcagcccagtcgtcttcctcccctgccaggggcagcgcggcgccccctccccgggactccgggcggcgctcccaggcgggcccggcagagggcgcgcccgagctgctgactcaccgcatccccgagcgcgcgcgggcgcagccggggacgccgcgtcacgtcacggctcgagcgggcgcgcctcggggaaacgggttctgcccgcggccggcgggtgggcgcgcggggcccccggcggcagccacccggccacgtcaccgaggtgcgggcgccccgccccggccacaactccgcccccacgcaccacgccctccccggggccgcggccctagcctcaccgtcgcccgcccgccccgggaccccggccacgaggcgcggacttcgcgctcccgcttccgctcgcggcttttcccggacgaaggcggcggggtggccccacgacttcctgcccctcccggcgccgggaacaatggcccgcgccccctcccgctcccggccgctcccttgggatcgcgaggggtaccagacccgtctccagacctgggtcccgcgccccccggggcgcgcccgccctttgttgcgggctccgggcgcttatgaatggctgcgggcgcgggcggggcgggggcgggcgcggagaggcgccagccccgcccccgctgcgctccccttggtcgcctgggcgctgggggcggggcgagggggcgggcccggctgccacgtggggcggtgccgcggcggctctcataggcccgggctcgcggccgactgggcgctcggcgcgcggcgattggccggcgcccggccggcggagtaagtagtgaatgggagggggcggcggccccgccccctggaacgttgatacattataacttttttttcttgttactttcacccccagatcctccgagcggcggcgacggctgttgctaagggaggggacgcgcgaggaagcgcgacccgggcggcagacggcacccagcgccaccagccgagcggcgccccctccccaggacccttaaccgcgccgcgtcccggtcgcgcccgccgccctttgaaggagaagcaagtgccgtccccacccccggaaggcgcccccaggagccggagcgacctcggagcgccactcggattttggatttcggtctcgcattccgcggccgggactttctcgaggaggacgcgcgctgctccgcgcccccgagtgcccggaggacccggcatccggggagcctctcgcccctgtcccggaggcgcggcgaggattggcggcgcccgccgcccccagccccccagcgcgcgccggggatggagccgcagcccggcggcgcccggagctgccggcgcggggcccccggcggcgcctgcgagctgggcccggcggccgaggcggcgcccatgagcctcgccatccacagcaccacgggcacccgctacgacctggccgtgccgcccgacgagacggtggaggggctgcgcaagcggttgtcccagcgcctcaaagtgcccaaggagcgcctggctcttctccacaaagacacgtaggtaccgcgcgcccccggccggccgccccctcgggccccggcccccgggcgggaacaaagagcgcgccgcgcggggaaggcagggggcggccagacagggggcgggggcgcgccgcgcgctctcgggcgccctctgctcggcctcgcctgcctcggccccctcccccgcccggggtcgccgcacaaaggcggctgcgagggcgtcccgggccgggcttcggcggccccccttgggggcgggcaggaatcccagggcgttgcgggggtcccggctgcgggtgtgggggccgccaccgccccctcccgcctgcgtccgcgccggcttccgcatctgctcggcggcctcctctgcgtctggctgtctccccccacttgcgtctctctccccccctttgttctcgcctccgagcgctccccgcagcctcccctcccccctggtatttaaatcgcctgcaggcccggagccctccccccgcgggcctccggggacacgcagtgtccatcccagtggaggggcccatcgggggaggggcggagggggagggtctcctttgtctgcgcggcggcggccgcctgcgccggggagggaggaggagggggagcccggcccggcgcaacccccagggcctctcctcgggccgaaacccgtggttcctacaaagaggagccaggactagaattagggaattgggggcaggggctgccctggggtcgtgggggaaggtggcatagagcacactggggcccagaggaggagaaagtgcctggttggggtgcagagggggtgccagagtccagggcgggggttccactggagggaaggggtccgaatcgccaggatggggctcccagcaccagacggagacctctctgcacgcgcttagggccctggatctggaagccgggaaggggtgggggtgggaacttatccgtctctccccacacaagcacagccctcccccgcggcctctgcttccgcgtccctgtgtcgtctccgcggagtctcatgctcttccttcctccccccagccggctcagttcggggaagctgcaggagttcggcgtgggtgatggcagcaagctgaccttggtacccaccgtggaagcgggcctcatggtaaatggccatggggctgcgtgcccccagaggcccccgcacacaggcagtagcccctccctcggtacctgtccgcacacacactacctggggcccccaccccgccagccagcagggccctctccaccccctattccagcccaggattccgaccccacactcaggcccctctcctccctctctttgtagtctcaggcctcaaggccggaacagtccgtgatgcaagctctcgagagtctcacggagacgcaggtaagacctcgccagccccttcctaacagggcagccctgggagcagggtgccttggccaccgacggggcctgggggttgtctgtgctcccaggaggctgggggaggggaggggacgcgccaccccgcctgggtgccagcctggcctggcctccccacctcctctcccccaagattcaccacctgacccggagggctttctctcccacggtggctgccctgggggaagggggcctggctttcacaagactgcctgcaggatgaccttggcctatggggcctcatccccgctcacaccctggcctgcatccccagccccctccgcccccaccgaggagcccccctccagccgctgtggcttccccagagcgagtttctccttttttacatttctgctgagggctgggggtggcggcttgggtgacactccttccgccttccgtgacccccatcgtgagagggtggggatctcgtcaccctcccctcctctctctggcctttgttctctaccccgaaaggggagggggcgggggtgcccagccctggggccagtgaggcctagacaggatgttaggaaaatatttagtaagcggccaggagggaggctggggctggccctcacccggttcccggttttgctgcggacttttttttttttttctccttctttcctcattttcttggctgcggccaagccttcctcagacaagggccctggccacctcccaggagggtgacacaggcctcagcaatccgcccgctgccagggtgggggacgcaggctgccacccgccccagcaaggggtggccggcttcccgggcctccctggccccgaggcccgcacccccttccgctttcccagcggcatgtagagtcctgccctttccctacatcgcgggggcagggcgggggccgggagctgggtggtctgccatgggggtggccacagcagcagcagcagtggcgtgggggcagagccggggtcccgagccagggcgggggctgcaggtgatttcctggggcgagtgtgagcagagctccccgccgctggggggctgcggttggcagggggcccagggcgtgttggcttcacaccctcctccctgggcgcctgcgtcaggaaggagctgggttggggggggctggagggggtgctgggcggagacactgggctccccagggttgcttccctgcctggcaccgagtcatgcccgcccattagccttccccagggaggaagttgcagggcgggtggtggtggggactccagctgctctcgggaagccaccccgggcccttcctgcaaaggctgtcttggggcaggggggtagggggccgggcaggctgggccgcagggtgggggcttcaccctgccctcctccctgcctccctccccatgggccccaagcagagaaggttacgccagctactgccagtggagaggagagccgggagggagagctgggaggcggtcggttctgagtcatcccagcctatgtcacttctcagaaacctccgccacccccccccccatcccggccactggggagagcagggctctggcccatacccagagcagggggcttggcgaggacagggtgagattcaacccacacccaccctgaacgggggcagattgagggtttctgtgcttggagcaggttgtgccctccgggactccagccccagggcggtcagggccccttcctgcagccttgccacagccccctaggcctccgccccgcccaggacagataaatatttatcttgagaaagcaaaggttaggacagaagaattcgtgcaggaattccacccacttgctggccctggtgacttagctgggagggggcctgaggtggagcccctcccgtatccacaggcagagaggatctaggggcccatgagggtgggggaaaggcaaagtgaaggttgtttgaggtcagtgactgccagctgggccccgccccctctggcctcagtttccccttgcaagaccgacctagttggccagggaggggcaggcccccgtctgacccgcctctgtccccacagcccccagcggcgcccgggccgggccgggctggcggaggaggcttccggaaatacagattcattttatttaagcgtccgtggcaccgacagggaccccagagcccagagaggggcggcgagaggccccaggtcacagcgcggggggactgggccgggctgggctgggggcgccgcaagctggggctcccagctgacggaccgctctccttgcaggtcagtgacttcctgtcgggccgttcgccactgacactggccttgcgtgtgggcgaccacatgatgttcgtgcagctgcagctcgcggcccagcacgctccactgcaacaccgccatgtgctggccgctgcggccgccgccgctgctgcgcggggggaccccagcatagcctcccccgtgtcctcgccctgccggccggtgtccagtgccgcccgagtccccccggtgcccaccagcccgtcccctgcatctccctcgcccatcacagccggctccttccggtcccacgcagcctccaccacctgcccggaggtgagcctggggaagggaagggtgacccttggttggaatccaaagggtgggccgtcctggggaggtcttggggaggacaaggactcttagtcccaggtgagtcccttgtattaagggctatcctgtgacctcgggctggtgggtgatcccccagcctagattggtggggtatttctagatcctgagttgacggtcatcgcctgacatgacctggaccagtagatgatctcttgatctttgactcatgggtcatctctgtgtcctgggttggttgtgacctcgtgaccttgggctagtttatctctaaaccctgtgttgacaggtcatctcctgacctgggctggtgggtgatctctggtccctgggttgctggtgatcccctgatcctggaccccgtgctcatgtgccccttcctcccatcagcagatggactgctcccccacggccagcagcagtgccagtcctggtgccagcaccacgtctaccccaggggccagccctgccccccgctcccgaaaacccggcgccgtcatcgagagctttgtgaatcacgccccgggggtcttctcagggaccttctctggtaggtgtcacagcacatgtgtgagctcacgtgtgtcccgtgaccctgtgcatttggggtctacatccacccacaggcgactccacatattctgggcatacacaggctgtgtccgtctgctcacttcacatgtcccccaggaatcccccacacacacgcctggccctgcccggggggccgcgggtcaccaggcgcctgcatactggggacgtgtcccgctcccgccccgtggtccctcgtgcacatcagcccacatgtccacgccattgcctgagctcatgagctcacacccgtggacgcccgtcctggacatgcgggactgtgcccgtgccgggcactcacggccacctctgcccgcaggcacgctacaccccaactgccaagacagcagcgggcggccgcggcgtgacatcggcaccatcctgcagatcctgaacgacctcctgagcgccacccggcactaccagggcatgcccccttcgctggcccagctccgctgccacgcccagtgctccccggcctcaccggcccccgacctggcccccagaactacctcctgcgagaagctcacggctgccccctcagcctccctgctgcagggccagagccagatccgcatgtgcaagcccccgggtgagtggccaccctcgggggtcctaccttccccgcccgcctgggcttctcaaggcccctctgtgtgagctggtgggctcaggagcagctgacctgcccaggggctgggggggatggcagctgccgtggccactgctctgctccagcccggagagaaggcagcatgtgtgtcagggcacaaagtgtccttgtgtgctcccggggggccacaggcccacttcctcctgccccacccccacccggggcatcatctccagatggcatttggtgcctctgtgaatggccaagtcaggcctggcaggccgaggcggggccagagcccacccctaagcatttcagtgacttggaaaagcagcgaacacaacccccctgccagcctggccccagctactcccaaacggcgggttactccctccagagtctcaccagaagatggctactgtactgcccttgggctctgcacccgtcgcgggggctcctcccagctcagtttaaaagtgggaaactggccgggcgcggtggctcacgcctgtaatcccagcactttgggaggccgacgcgggcggatcacgaggtcaggagatcgagaccatcttggctaacatggtgaaactccgtttccactaaaaatacaaaaaattagccaggcgtggtggtgggcgcctgtagtcccagctactcgggaggctgagacaggagaatggcgtgaacccagaggcggagcttgcagtgagccgagatcgcgccactgcactccagcctgggcgacagagcgagactccgtctcaaaaaaaaaaaaaaaaaaccaaggtacaacccccaagtatctcccctcggatcacagaagcggccaagccccctccatgtaggactccaggaagaatgaggcaggacagtcctgacctccccagctcatggctgagctggagaattagaagccagctgcgtagctgggactccaggcaaacaccaccatgcccagctaattttgtaatttttgtagaggaggggtctcgctctgtggctcaggcctgtctcgaactcctgaggttgcccaggcctgtctcgaactcctgagctcaagcgattctcctgcctcggcctcccaaagtgctgagattacaggcgtgaaccactgtgcccggcatggtggatgtccttgactgtttcctttgctgacctccctccagggagggcaggactgtgtctgacctcaggggcatttgctggggtctggggtggtcctctgtgttcagcaggtggaggctttgggagtcacaggccactacctcctttgcaggggaccggcttcggcagacagaaaaccgcgccacgcgctgcaaggtggaacggctgcagctgcttctgcagcagaaacggctccgtagaaaggcccggcgggacgcgcggggtccgtaccactggtcacccagccgcaaggccggccgcagcgacagcagtagcagcgggggcggcggcagccccagcgaggcctccggcttgggcctcgacttcgaggactccgtgtggaagccagaagtcaaccctgacatcaagtcagagttcgtggtggcttaggatcttcggatcggccaccctcgcccctcgcaccccagcccagggcggcggggactccgagagccccggagagaacgtggcccagccctggagggcaggcggccactcccccagccagaagtctttttttcttttcttcttttttattatttttttctttttttaaaaagttctgaccgtggtttcctggactcttcatgggctttgcttcctacctccttcacccttcactcctgccctcctcttcctcctcctcctcctcctccgtctgtctcctttcacctctgcgccaggtcggtcctccctgccaaccttccccagctccaatatgtagcagtctctctggatggcggagagtgaaggagacggagaaacgcgccccatcccttccgccgcctcctttcccccccgaccctattcaggttttaagtcaaaaatgtcgatatgtcattatgcactttacagatgaggggaggggccgcagtgcgcagaacccaccccaccccccagtgcagacttcggggtctccaccccaggccagcagcgcccactgggctacagcaagccaacaggtcacagaagccaacgaggggactgtttctcttccactcctatcctcttttcttgatcttttttttgcattttccttcatttctttaacaaggagagcaaagctgttttagcagaggctggggctgaggtccccatggggtttgggtgcaggggcatggcaccctttcctgtcgggaagggagaggggaactacccccccagcctgccctccgccccgccccagccggcggactgtgctgtttcctccgcccccactcccgtgttttctgacctcctgcctgagtttggggtatttatagactattaattttctgactgagccaatagtggttggggaactcttgaaaaaggggagagaatggctgggtgctggggagttcccccctccgagccctccttcccggcccaacctgagggatgtggatttgggactgtctgggggcccctcctgcagcgaggatgggagggggtgctgagctgtgaatcccctgggcagggggcgacaactccgtgtagcattaacccccgtggcggggtccgctgctggtctaatttggaccccctgcctctcagtgcccctgccctaggggtgtctgtctccagaggggagggacaaatcccctactggggccatttcaatggggtagtttttggatttttttccccactcactttttattttttaatgataatggagatgtctggacccttcctcaccccacctgtcggtcttgtcctggctctgcctgtcccccaccgttgttctcgtaggtgaaccccaggtcctcaactccccccctttatgtgttgaaagttaatggtttcagatgtgaacatcacgtgttataactgtagcgctgtaaatttttttgtgggagggtgggcagggaggggtcccagagggtagagctcaaggattttgggttttgttttgttttcatttttccaaaaaaaaaagaaaaaaaaatagaaaaaaaaggagtaaaaggggcgggtttgttttttgaagaactgtcttggatacctatttaaatgtgtgttctgttttgttttttaacgatttttaaataacgtctgtgcctccactggttgagggtggaacctccaggcaggaaccggctcgccaccctctgcccggtaagggctgcccaagaaagcattacccgccctcggggggtcgggctgtgggggtcccggcacctggcgtgagtttcatgtatgaaaacataaaattgaaaaaaaaaaaaaaacctacacgagcaccgtgatttcaagtaataaacagaaaatgaaacacacattgactcccgcctgctcgcctagtggggggatctggccttggttgggagggttcctggggtgggatgtcagctcagggagtcagagggactgacctgggtcccaaggccccgaagagggggtggggcaggggtcagggccctgagaatttcccacgctccttccccggctgccgggtgggcaggaagcagccagggtgggagggaggagcccagccacttcctggtacccaaggccggaagtcccttagggtgtggggcgagggcctgcctgcctgcttcgtggcctgggcaggaccctggccccctcaggacctgccagtatgggggagacgcgaccaccagctctccccagccacaggagtcggggactcccactctgccacacccacctgctccccttcctggagtctcacatctgtgtggcttgctgcagggagatcaccaggccgactgggaggacctaggactccgcagggtaccttgggctggcaggtgatacaggcctggcttgacccagccctggggggcctctctggccacacctcctgacattccagcccttcccagacctggccttcagctccaaacctcccggcctttgccccctgtctaggaacacccctggtccggctgtcccttgctgtctgggaacttccccagcctgcgccttccacccctgtccaccccgtcccgcagaccccacccttccctctctctgtccctagcctggagctccccgtgagcctcaccaggactgagtcctctctggggtcccacctccacccatgtccgggctgggcagagatgaggcaataacactatttcatgtctttttttaaattttgtaacctgtatttcctcaggtaacaagagttgcctatgagaagtaattgggctcccattttatagatgggagaacagaggcccaaagaggaacatcacttggcccagaggatttggggtgtttgttcaatgatgtgacctccaccccttatcccatctctaggggccccagtaccgggagcccccaggggaaggggcacaggttcagagagtggcctgggagcaccttcctgagacccctctgcccctcccaacgcccagtcaaccccaaatcatcgcacgcccacggcaggaaggcggatgcccagtcaggcggcacccaccccccgccccgtccctggtgcggatgtcccctcggggctcagggtgggggtgcgggtcaccgacgccaggcctggggtcaaggcgagggccccagggcgccaccgccccctcgctgggcggggtgggaaggaggaaggaggatgttgtctgaagcacctgctgaatcacaggggctgtgtctgtagcctgcagggtggggggcgcgtcccctgcactccaggacccgcccctcgggatgccgacccccaccccagactggggatcccaggggtcaaggctgtgccctgggggcgtggggtggggtatggagctccaggctcagagccctggcctggtagggtcagcccaaccaggggtgcagcgggcggaggggcggcaggcggaggccaagtgtgcgtagggaagcacggagaggtaaactgaggcacaaagagggcagggaccgctgggatctcgcggggcggggtcggccctggatcgctcccttcccccaaccattgaggaaaaagctgaatgggagggggcggcccccggaaacccgccgggatggaaacgcggtttccagggcaacgcgccgcgaaaggagcctgacgtcaccccgggtagggcgccctgcccgcccccgtccgcgcgtcgcgcggcccaggccccgcccaccagcggggaagcctcattggtgatcgcaccgctcgctcatcggcgtgccccagtagcagcgcgacgaagcctccagaaggcgggacttcagcccggcagcgccgagtgcgcaggcgcaagcgcggaggcgctgcagccccgcctctctccccgcgcgtctgcaaagttgggggcgggaggcgcagccgagggtctgacggctgcggcggggcctggacggaagagggggcgagccccggggcgccgcacgtggacccccggcacgggcacgctcacgtgcacccgtcctttcacgccaacgcgtttcctgctgcccccacccctgcaccactgcacgtcccagaccccggcccagcctccccgcggtccctaggctgggggagctcagacaggaggctaggaggagggggactttggggctgaggctttgccaaaggagcaggagtttgccaagtgttgtaggaagcgggaagggtgcgccaggtagggggcacggcgtgtgccaaggcccggaaacgtgaaaccgagtgcttttcgggggcaaccgggaagtcagttggtggagaaaaatcaaagatgggaggaaaggcgaggctgacaaggaccctaaacggtgattccccaagtcggccactggagggatgacttgggggaccagagaggaagagcaggtgagggggagcggcggccaggacatctgggaggtggctagacccgtggcctggactttggggggcggtcgagttggatcgatgatcgatggggaccctggcggcctcaccctgggggaggtagagacgaaaaaggaactacggtgtgcccggaaggtggtggctttaggtccacagggaggtggttggcaaggcgggggtaacagggggaaggagaaaatctgaaatgccggtgtgagctccgggccaagagagttgaggactcaggaggcaggaatcccccgtggccgcccgctgcttggctgtgggctccaacttggtgtgtgctcagagaaggcagtggttggagtgaacagggcctgtgccaggtggggagactagccaaggtgtttgtgcagcctggcctctggagcggcctgggaagagctggagttcgcagggtgggagctgccctgtggctgggagcccgtgctggcgtccctgccaggcggtgatctcacaggtgagcggtgcttggggagacgcggagctgtgggcgggcaggagaaggtcagtggaggtcatggcttttggcttgaggccggagtcctctgggggtggccgaatgcgcccttggagctgccttgggaggtggctagggtggacagcagtggaagccaggcccttggcttagagccactgggttggagggattgagccagtgcccgggcacagccgcccccacagggccttgccccacccgccctcctctcccagcaccatgggaatgggagttaccgggctggaggctggggacgccaccaccccgtggccaagggcgttggggcccaacccaggagcctggtgcagccccacccacgggccgcccagccctggaagggcagagaactggctgcctctggggtcacttgggacaggtgagcagcccagcccagcccagcgggtgggggaggggaggctgtcacctgggccctgcctccaccctctttctggttctcactccctccatttctctttcttttgcctttctctatttctgtcccgatctctggcgctctccccaacccagtaccaccatctccgcccctccgtccctcccctgcttccgccccctctctgggggcccccttcaccccggggcacattccagcttcctcccccgccttgcagtccctccctggagccagctgcctcctcggttgccagagcagagagagtgggcttgggccgaggtcggaggtcgaggagcgggcgggagcctgggagggcacccccaacccctctggaatgtgggtggagcggggcaagggagacagctggtttccacggagggcacatgccccatacccaggacgctacccacactcagccctgggggagagcaagcaaaaccaatgggtgccatcccacgaggggcctgcacagccatcccacacccccgaccagcacgcccgggacagccctccacaggccacgcatttatgggtgcggctggtgtgccaggctcccagatacacaacccccccccccagacacaccccatatacctgtccccaacctcaatccactgtgtgaccctaaaacaaacagaacctccttgctcagcctgggccaaggcctccccaaacaaaactccagcctgcagagtcccaccacacaccgcagctgtcaccagatacaaagagggccctgaccagatacagagagggcagcagccttcccccacaaccaacacacgcctgggcgggggcaggaacacccccagggcctccagccacagacactcacccactcacccctctgtgcaccagtgatcctccgctgcccagccaagcttgactccagcctgctggagtctgggtgggggatggagaggggttcccaggcgagccccaacctatgccttccaaaagtctttctgtgcatgttggaaatacaaatgaaacaggagagttagcatacgggacaattattatttttgtttgtttttgttttgagacggagtctcgctctgtcgccctggctggagtgcattggcgcgatctcggctcaccgcaacctctgcctcccgggttcaagtgattctcctgcctcagcctctggagtagctgggattacaggcgcccgccaccacgcccggctaatttttgtatttttttagtagagacgggctttccccatgttggccaggcaggtctcgaactcctgatctcaagtgatctgcctgtctcggcctcctaaagtgctgggattacaggcgtgagctacagcatccagcccaattttatttatttttagtagagaagggatttcaccatgttggtcaggctggtctcaaactcctgccctcaaatgatccacccgcattggcctcccaaattgctgggattacaggtgtgagccaccacacctggccccagttattagtattttcgagacggggtctcactctctttccaggctggaacgcagtggctccatcacagctcactgcagcctcgctggaactcctgggctcaagcgatcctcctgcctcagcctcctgagtagctgggactacaggtgagcaccaccatgcccagctaattttgctttttttttttttttgtagagacagggtctagctatgttgccccggctggtatcaaactcctggactcaaacgaaagtgctgggattccaggcatgagccagcgctcccggcctgcatacgggatgattccatgtggactgccacatcaaggaagcaaacaacaaggaaagcctggcgctgcgtggagctgtcttttgctgctaactgcccttgaccgacttcctaccaggtcttccctgtgcgcctctaaccccaggaggtgctgctggcatgcccacctctcagatgaagcagtgcggtccagagagcgtcttgggcaccgcctgcctcacagctgggcccctgaccctccagggactgtggctgagcagccatggctgcctggacgggtgtcccctggcccgtctgtccgtctggatgtgggaaccctccaggcacgctggggcgggcaggtgccaggtgcctctccagcaagatgcaacataggtgtcttcacttgcactccgtaggtcctgagcccctgcagctgcctgggagagtggggaaatactctccacttgtcccactccactgttgccatggagatacctcccaccctaggcagggccaccctgagcctggttggctttgcaggaaatccccactctttgacctctctgttaggcacaggacgtgtagtcccatgagagggaactgggcccaggtggagatccatccgcctaccccagagcgcgcatctgttgctaagcaacatctgaggctgcatggaggtgggggctccggagcccccagaccttttcccagtttcagaaactaggtggctgcatccccagcgtccacgcaggcgagcctaagcctcggtcagctttagggtgtccgtgggccatgcagggtcttgggcctttcacagacacctgatctgcacgtcacagacacgcatgggtgcacgtcactacacgtccgccacatgtgcttggctggtctgcgccccagcagaaggggtcacctatgtctctgcagtatcctgtgtactgaaagagcaaacaggtgtgtgaccccagggcaggtcggggtccgtcctgtccccagcctgtctactgcgtgtgcctgtggcaggcagggtctccggatgccgagtgcatggtgtatgactttgtgtccagtgggtacgaagcaggggtgtgggtgtgcacctgtgtgtggcctgtggcggggtgtgtgtgccggggatgtccctctgtggcccaggcctggcctttgggctgctgggatggcctggccggggcaggagtagacagggcctcccagcctccacattcctgagctgtgactcaggcctgtggggagggggtgagtcacagggaagggaagccgacccaccctgcgaacgcatccgaggaacaggagggaaactgaggctggggagcagctcagtccggctttcctgtgtagcagcccctgaatctcaggcccgggggtggggcggggtggcgggggggggcgcgcggggcctcccaggggacctgagatcccagccctggactcagctgggagctgggggaagaggcaggtttaacccttcctcttctgggcttctggaactctgggctgccctgggaggcgcggctcccgctgacacagcacgcgtgcccaccccagggacatgagtcacagcaccaggcatggacacatatgctctgtgggtcccggcacacccgagtcacgcacacccagccctgtccccggctgcccccacatccacatccggataagcgcacactttggagtccaagcgcccacctccttgggttgcacacacagcgccacgcagacgggttcctgtgtctttgcacacacgcgggtgccgggggctctgtgcacacacctccaagactgcgtgcacgcccctatatgccctgcgcaccgacgcaggccggcctggggtccctgcactcaccacgccgtgtgcactcgcacatagctacacattcgtgtccacacaagcttgtgtctctgtactctgcccacgggcacacatgtgcgccacacctggcaacccgcacgcccggtctctgcatcccccaccctggctctgggccccgcgtagtggggccagctgggtcggctgcagcctctgccaggacggtcctatttctgcgcccccgcggggcggccgccaggtgcacggtcccggcccccgcctggctaggaggaggcggtaattatgcggccccggggtcccccccacgcgcctttcatcctcggccacgcccgtcgcaggcctagacgctctctaccgcctcccgcccggtcattagtcggggtcgggggaggacctggcgtccggcgggcggggccccgtggggagggcggagtgggcggtgcgggagcgagggagctccgccctcgtctccatggcgacgccccgcaggggaggaggcccgggaggagtatcagggtgcaggaggtgcgcgccccttccgagacggcaggctggaaagggggcggatttgtgaatgggcccacggggcccaagacagacgcgcggggagcaggttcggggactctgactgatccccgcgcctcgccgggcaggggcgagccccgcgcgtcgggcccggaatagcagtctcgcccccgcccggcgcggctattttgagctcctccgttggggccgaggcgcgggggcggcgggaggctgggggtcgacacgcaggctgcgtcctcgccccgcgagattggacccctcgaggactgtgcgctgtggccgcgcagggctgggcggcggggccccctctcccacgcgaggcgtctgcgtggagcggcggcaccgggagcccggccgctcgagccaaacgccgcggacggagcgaggccgcagcgccccctggtgtccgcaacgggcagcgcgtcccggtcgggtcccgcatggtcagtggccagcaggggtggatgaaggggtcccagccgcctgagacccccggtggggacacaggatcgcggtgagatacctgggagtcacgggtgctcgcagacgcagctgaccccagaggcacaggtaccgacacaggtccacacctggaagccggtgcacagtgctcggcacagatgcaaagcggcaggtgtgcgcaggtgcgtgtcaacgccaccctgggaacccaggatggctgcggacactcacggagcccgcacccaggaacccgctcgtagtaagcgcttaataactaggcactggctgaatgaatgaatgaatgaatgaacacggcgcttcgcaaaaccaggaaaaggcagaggctcacagaaccagggaacgatgggctggggggagcggcaagaattacgcaattatgcaggggccgctgtgactaccaggcaccccctccaactccccccctacaagggctgctctgggtcagagaacgtccaccgcgctgactgctggggctgggggctgggggcgcagatcagaaagaatgggcctgaattgctcccaggctgggcatgtggcgcccgcgtctggggctccagtgggtgggtggcccctcccgcatggacggcgggcgcaggggagctcggtgctgatgtctctctcctttaataaccaccctgcgtgagtggctgacgcagcagccggctgccgctgacggggagtggggcggctgtagtgggggggcccgaggtgcagagggggtggtgatgaatcacacagctgctgcctgggggagggggtcttgagcccatgaggggtcccagagaccttgtcactggagacagcgcccctggctacccccacctcgatccacttgagggtggaagtgagtctgaggtcaggagtggggccgggatttccctgggatgagcagcaaagcgggggtctctgtacgccaacttcccccagcttgtcagcagagggtcatccctccgaagactttctggggcagagaggcaggggtccgcgctggcttcttccaccagggctgggggaggcggcggcatgagatgactcctgggcgaggagcaagtggtggccatagagggccccccagaggctttggggccgccgaagagtagtgagtgagggtccttgtaaagctggttctccagatggcggcggctttaagactcccctccgccaaccaggctcagtaggggaggcctgtggaaggagagaaaaggcctgggtggaggagcagagtgggcctggccccgcgtggggagcgagtgcgccgttgctgtgcagcacggtgggaggggaggccgagggccgggcggagtgctggggtgcagtggggactcggggtgtccgcctgcacccgacagcagggacgcacaacactatccggccaggcgagtgtgggggtgtgggccacgcacccagccgtgataatcgcggttccagtgggagttaggcttgggtgcgggttggagtttgtaggcaaactgggttgcgtaaagttggggtgcaccaaagtgtggcgatgtaggaagaattgggattgcgaatattggggttcgcatgaatggggttgtctctgttggggttttggtgggcatggggttgatggcaggaatggagtgctggggtgctgggaaaactgggacgtcggttgtattggcaagaatatcacgacaggtgtcggggttcagatgaagttgggatgtctgacagccgggtcttggttgggtaggggatctgggctaggttgttatgtcgggactgctggagcacaggcaaagtcggggtcccagtgacacccagaagtccccatgaggcctgaggcctgggaatcggggctagaggcccatttgttccccgccgcaggccagggagcaggcacgcgtaactgggtcagccccgccccgccccgccgcgcgctggtcacgccccctcgagcgcgggtggaggactgcggactgcaaacgtctcggccaatagtcgagcccgacaccagtccgcgggagggggcggaaccgagatagactcggcccccagctcatgaatataagacgcaggcgcgccctctgattggcccaggatgtgtagggggcggggcccggcggaagcgtatataaggccgggctcggggacgcccccccctcactcgcgcgttaggaggctcgggtcgttgtggtgcgctgtcttcccgcttgcgtcagggacctgcccgactcagtggtgagggccctggctgcaccggctccgaggagctcggggcggcgggcggcctgcggcggccaggcgaggcggggccgcagcggcacgcccctgggagggggcgggcccggggtggagtccgccccgccggcggcgagggacagcgggagattgggccgagtagcggccagagggcctctccccgccggtccgggccgccggcgacccggttgccgccgcaaaatggcggccgcgagctcgaggctgtgcccagcgaaatggcgggagcgccgagttcccggatggagtggcgcagggtgcgcgcggggcgcatgcgcacgcggcgggggcggggccacgtggcgcccccggtctccagggccgctttcccggccttggggctggaggtatccacacaccaacgcttttgcttaccgagccttagtttcctccttttcccattgcgattgcatgagggaaaggacggcctcgtaaatcttgggtaggcgtggcccgttctagtgtggttcctcgtctgccacgtcgtgctttgcgcccaaagtttggtccaagttggcacagctcccagtgccagacttccaagtctagttctcagagccactgggtggcggccattcccagccagtgaatgctttgtctgtgtcagcactgaccgcccccttaaatagccagttctcctaaatgccacttcccctgcctggaaatcctgccttatcacttccggggccatcccttcccgattcccggcctaggtcctggctatggaagtcagtacctgccctgaggtgccccccaggacggggcggcctccctgacagccagccccccccccagtctcaggaggcattttacagtgagcagaagcacgttctggtccagcaacaagtagatgtcagttggttagggtaggagttggcacccgttcggaaataggagaacctgagagtgcagtcctgcccagggcacaactggaaggctgtgggggaagggagacacccattgtggaaatgggtgcggcctgccttcagtcttgggggtggatggagtaaattatttgaattaagaagtcctaggtggctgggtgcggtggctcacacctgtaatcccaaaactttgggtggccaaggtgggaggattgcttgagcccaggagtttcagaccagcctgggcaacagagcaagaccccatctctactaaaacaaatttaaaaaaattatccaggcgtggtggtgtacacctacagtcccagtttcttgggaggctgaggtaggaggattgcttgagcccaggaggtggaggctgcagtgacccctgcactccagtctgggtgacagttagacacactgcccccgaccccaaaaaaataagtcctaggtatgagtttgagataatgaaaaataaaaatctgattttctaatatttcccctaaaaaacacatgtcatttacataaaataggaagcggggagaggtggtgagagatgacccctgttgaggatttcattggtgtctgccacaggccgccatggcatcagatgaaggcaaactttttgttggagggctgagttttgacaccaatgagcagtcgctggagcaggtcttctcaaagtacggacagatctctgaaggtgaggctgctgctgggcccgcggccctgggcgggggggcttgtgctcctcctacctggaagtacagctgggtgctgactgcagacctctctcccctgcacagtggtggttgtgaaagacagggagacccagagatctcggggatttgggtttgtcacctttgagaacattgacgacgctaaggatgccatgatggccatgaatgggaaggtgaggatcagggtgctgagcaggagtcccgtctcgaggatggggcacccacctgctaacccgtcccgccctctgtctccagtctgtagatggacggcagatccgagtagaccaggcaggcaagtcgtcagacaaccgatcccgtgggtaccgtggtggctctgccgggggccggggcttcttccgtgggggccgaggacggggccgtgggttctctagaggtgagtgccatgagtgggtcccttggggatgctgtgaggtactgctggtgggagctggtactcactttttcctgtatgtgcaggaggaggggaccgaggctatggggggaaccggttcgagtccaggagtgggggctacggaggctccagagactactatagcaggtgagggggaggccggcccaagcacaggggtggttgcgggatggccagcttccgtcccgggtcccaggtccctgggggagctgagatgagactggctgggcaaggagcagaggcaggtggggacccaggccaagaggagaggagactgctcaggacattcgcagaagcgggagggcctgggggacaggctggtggagattttgaacaatttccaagatgctgccctgctggggtccttgttgtgtccccagaagggacggctggcatgggggctggcggctcagcctgttgtggcagagcagaagtagacgggtaccttccggtactcaacgtttgtctgtcttgcagccggagtcagagtggtggctacagtgaccggagctcgggcgggtcctacagagacagttatgacagttacggtaagtcacactccgagggcgccacgctgctgtggcctgcggtgggagctcggttcaccttggtgccctctccaagcactttaggctggacactcagaccttgtcactgtgcttgcccagaagaggcgcatctgtcctctcagagccatttctatcgcaggacgcaaaagccaaatgagactgaccaaaaaggcaagggagagcgagggcccgctgggcagtcagctaggtgcatgtgtggccgcaggccagcctccctcggctgtggggggtggttgctccccggccgcaggccgcgccctggtctggcctctggggtgaagctgcctcttgttgcttcggtgcctttacactgtgcctgcttcttgtcctcagctacacacaacgagtaaaaacccttcctgctcaagatcgtccttccaatggctgtgtgtttaaagattgtgggagcttcgctgaacgttaatgtgtagtaaatgcacctccttgtattcccactttcgtagtcatttcggttctgatcttgtcaaacccagcctgaccgcttctgacgccgggatggcctcgttactagacttttctttttaaggaagtgctgtttttttttgagggttttcaaaacattttgaaaagcatttacttttttgaccacgagccatgagttttcaaaaaaatcgggggttgtgtgggtttttggtttttgttttagtttttggttgcgttgcctttttttttttagtggggttggccccatgaagtgggtgccccactcacttctctgagatcgaacggactgtgaatccgctctttgtcggaagctgagcaagctgtggcttttttccaactccgtgtgacgtttctgagtgtagtgtggtaggaccccggcgggtgtggcagcaactgccctggagccccagcccctgcgtccatctgtgctgtgcgccccacagtagacgtgcagacgtccctgagaggttcttgaagatgtttatttatattgtccttttttactggaagacgtacgcatactccatcgatgttgtatttgcagtggctgaggaattcttgtacgcagttttctttggctttacgaagccgattaaaagaccgtgtgaaatgaaccttgctctgacaattcccttgcattgcaccacacactccttgctgcgggctcctgcagccagacctgagcagagagagaaggtggagaagcagcgggtctgcaagccttccctggggcctgcagagctagaaagggaggcccagcagactggcgctggtcagggtaggggagccaggcgggggacgggagcgggcagctcaggcctcagggcagccctgggaggcttctggcagtggtggccagagggctggactgtgcgggcagcttagcagggacagtggacgtgcacctgacgctgacctggactgcctcagtctagaagcaggccagagagcagaggcacgtggcatcccagggcgacctcagacggccagccggttagctagttctgctgttgcttcacgagttctgagcattctctgctagcctatggaagctgcagccctcggaggacagaagtgttgtgcgcccaacagaaccctctgagacgcaagctgctcccttggctagctcatatgtggaaatagccctgtaattcgaggtaactccttccgctcgtgtccacatccctcttgttgagagctcactgaaagtcatgtgcccggggaatgttcctgtgactgttttttgtttttccttttttttttaactttgtttttgtttttttcaattaagctggaactaaagtcaggcccagccattacgctccccacgtgcagccaggtgcagcctgggcccagtcatgcctggctcatagatgaaatcccttaagcaggattgaagaccagtgaacgcccccgccttttggattttttgctcaattgaccgtcttttccagacctctttaagtcacactcttaacttagctttctctgatgtctgttgccgccattagtttttttctagagcccacactggcccacatagctccatcccatacgggtagctggctccagctgcgccaaggtgcagacccgccctgggcatgctggcctgtgacggagcctgaggtcacagccccctgactagcctgagaccttcctaggggctgtggctgtttccggggaggccgggaggggcagctgtgagccctgtggaggacgttgggagtaacgctgctttgctttggcaggttgaaggggcccggccaggactcggggaagggtggcctgagagcagcgatgacctctggggtcactgtcccaggagggacttcacctggaacaagagctggaggcagccgcttgcccaggaggcttgtcccctgtaagtgctttcgggaagagtggcatgtggcgctgagccctgtcccgggcggcacctgggcgtttcagtgagtcctgctctcccgcacctatggccccatggcgggcgcctttcggtgtgtgttgggtgcagggcagcgcctcccgggagcgccgggtcccccgcctggagcccgcgcctgttctccctcccttcctcctccttccaggaggcgcttcgccagtgaggtgcgggctcagggcctcgagtctctcctggagcacgggctgcggtgcgccggcagcttacggggcggccagtccttgcccacaacgatgtggagccctgtgaaagtcggattcgaataaagggccacgtgtgcacccagaaagccgagtctgtggttcaggggggtctgtcggcggagcggggccactggaagaaaagcctgcggacctcggttcagcgcacgagtaggacccgacagggaagactgcaagggtcattgtccgagcagtgaccgcggggggctcgccactgagggggttcgcagcgcggagactccagtctcgcgggatctgaggcgcactcggcttcgagggagcggcggccgcgcagccgctgtcaggccccgtcttgggccgagtcccgggttccctgtagcaggcttgggagcggggcgccaccttcctgggccctggacgtggccgacgcgttctcagtgtccgtgaggccggggcaggagtggcgggggtcgccccgaagtgggtgggaatgagcggcccgaggtcctgaagtcggggtccgccccgtctccccgctgccagcccgatttcctcggaagccgcgaccccccacgctgggctggcagttctgggctctgccggctgcgccttgccgggactcccacgggcgggctccgggcctccgtcctgatcccttggagcggttcgacgaagcaagttccgcggcgggcgcgcggggcactgtgggtagcgccggggctcaccaggcggaggcggggcccggcgtcaagctccgcctccgcgccccattggctggcatcacctccgcgcgcctgactgacagcgcgcataggggcggggcgccgccaccgcttccgccgggccatggggccgcgcgtgctgcagccgccgctgctgctgctcctgctggcgctgctgctggcggcgctgccgtgcggtgccgaagaggcctcgccgctgcgccccgcgcaggtcacgttgtcgccgccgccggccgtgacgaacgggagccagccgggcgcgccacacaacagcacgcacacgcgtccgccgggggcgtcgggctcggcgctgacgcgctccttctacgtgatcctgggcttctgcggcctgaccgcgctctacttcctgatccgggcgtttaggtgcgtcaggcgcacgtgggcgccgtctctcagccttggccaattagcgcgcgcctagtgcgtcacgtgccgggccgcggggtcctcccctccctccctccctccctccctctctccctgttggagtgggcgtgggcggtgctgtgcggggtcgtcacgtggtgtgggcggtgcaggggccacgggactcacccgctctccagcctgcgcctggggttggaggtgcccagcgcgccgcctcttaactcgggggtgacgctgcccgtttcccaggtggggccactgaagccggagcatgccgggcaggggtcaggccctggcggggcgagggggcctccttggctccttgtcgccggatgcccgtcctcgttctcatcttcccgcctgccgccaggcctttccgtggggtcccgatattttcctttctgcttctacccactgaagctggttcgtcgccagggtcggccacgtgcccgccttgggtgctcccacagcccgggaggtgcagctgcgtccccagaccctcgcgggggtctccagctgtaggcagcccctgggcaggaggggcttctgcgtgttcaggccaccccggcttccctggcctgtggctccagtctcctctgggctcctgactacccagtgtggctgcttctcccgggtgggagagacacagcgaggaccttatccctccccatcaccaccctggcaaagtcaagccgctttttattttttataagtttttattgtagcgatggggtctcgccatgttacccgcgctggtctgaactcctgggctcaagtgatcctttttcgttggcctcccaaagtgctggcattatagatgtgagcacctgcactccgccatgctgctttttatgggccctgtgcagagcctcccctgtgctccacacctcttcctgtggaagcacctgctgcgcgctctcccctgcctgtatgccgcgccctccctgcctcccgggctgctggggccaccaggggcttggccctgagacaggcttccattctgttgtctttggcaaagtctcacccctgtgtgagcctcagtcttttcatcagtgcaatgggagtgacatcagcgtgcctctcctggggtcctggcgcaggggagatgggagggcctggtagggcacatgtcttcttactgtcatcgccatgggagtgaatggtaatcacttggcgattaggacatgaaagaagcaggcacagcaaaaccagggaggtctgcagcagggctcggggctccagtagaggacggcaatgagagtcctgagggaaggaggaggcagggttggcggggaggggccactgactatgcctggacctacttccaggttgaagaagcctcagcggaggcgatacggcctcctcgccaacactgaggaccccacggagatggcctcgctggacagcgacgaggagacggtgtttgagtcccggaatctgagatggtgtgcacccttccccagctctggggcctcggtgggcaggctgggctggagactcagcaggaccctggggacttggccaagccatggagtggtccctgcaatcacagctgacagcggtagtcaggccatggccccactgggcagggctcatcccttctcccagcctccatttacaactttttttttttaaacttaaatgtttgtcatttatttatttttgaggtggagtggcgcgatcccaactcactgcaacctccgcctccgggattgaggcgattttcctgccacagcctcccgagtagctgggattacaggcacccgccaccacgcctcgctaattttttgtatttagtagatagagatggggtttcaccatgttggccaggctgggttccagctccttacctcaggtgatccatctgcctgggcttcccaaagagctgggattacaggtgtgagccaccgcacctgacctaagttttgttttgttttgagatggagtttcgctcttgttgcccaggctggagtgcaatggcacgatctctgctcactgcaacctccacctcccaggttcaagcatttctcccatcgcagcctcctgagtagctgggattaaaggtgctcaccactacacccggctaatttttgtagttttagtagagacagggtttcaccatgttggccaggctggcctcgaactcctgacctcaggtgatctgcccgcttcggcctcccaaagtgctgggattacaggtgtgagccaccgtggtcagccttcttgcttttttaaggcaggaaagcggctgcagggcttagggtagtggttgctccatctgggcccctccctgagggatgaggtctaagtcaggtggagaactgactgcaggatgcttctgagcgggcggggtcagggagggcctctccctggtgtaatggggctggcttctggaagagtgtctcaggccgagggaacagcagggagcggccgggctgcgcagatgccgggcgggactggggtaggcctgggcatcgaggcagctgtcaggggttagcagggttctgggcagggaatgatgggtatgttgcgctgcagtgtggctgctggggggaccttggcctgttggggggtggcaggcatggaggctgggagaccaggagactgggcggcctctggggacagctctgactttttgagcccccagggagggaggcactgggatccctccgcatgctctgactccattctgggaacccctcccaggtttcttctacctcctggctgggggccccttcccccggagtgggcagttgcacagggcccaggaggccggggagggaggccagtggggggaggctgggccctggtagaccgaggggcctggacaggctgcctgcccctgcctgacctgggtgagcctctgcccggcagggcgggcccttcactccttccctctcacccttgaccccctgctttcagatgctgagccagggaggcggcccttccagcagccatgagggaaggacaggagatggggcccaccccagtgcccagcaaccccctgctccaccgctcattcccctgctggccccggggctggtctcacccagtgccaacccgagagctccttttggaacctgcacagcccgccgacctgttgccacctgcacccaccgctggaccatgcagcctcgcctcctggatgctgtcccagcctggccgagggtcccaggtgaagactggagggaccccaacagccaccgcccaggacgctgaggctcccttgcctgactgtgacttgtgcctctctcctgcccccgtggggacatggcagcccagagccaaggctgggtgggcaggtgacccaaggaacctttctgggaacaccttctcgccgggctgggaacaataaatgcagccatgtctctgcagctggtgctgaccccatgccacctctagacccgtgcgtactggtgcagccagtgtgggggtgggtggcggagcagggctcaagccagcctcggttccccatctgcgaccatgcttgggttctccagccttgctcccaagtaaggaacccatcttcagctgcctgggatgaggccctgcctgtcagcatctctcttcctagagagaactcctattcatccgtcaaagcccctgccccagggccccctctatgccatcccttcagcctgggtctcatgggccctgccctggaggatccccacatcaccctcatgaatacctctggcaatgattccagggagccccagagctctgctgcaggaggctggagttccgtgcggcctgggtccccatgccggacactcctcccccatctgcctcctgtgggacttggagcctgagaccccatcccaggcaaggtgcttaatcagcttccctggggccttgttcttcctgcaggggcctgtgtctgggcggagtccagccctggcctgtcatcctgtcccccatgaggttagccttggagagaccatggtgcgtgggtacccatggcctgaggtcccccacaggcaacctgtctggagctgccactgccctgtcacgaggaggagctgccaccaggtggcagccttgagccgcccagtcctctggctgtctccttggtcctaacccttcatgtgggaaagcaagtccagcacagcccatttgtcactccacttcctgaacccaccgtgtcctcacatccactgggggatgggcagtcccccaggtttgcatctcacatacctgccgaccctccctgtctgccgccagggttgggaggggctgtctccactgggggccaggctatcgccccttcagaccagggtcccctgtcctggtactatctgttcccttgggcatgtccgtctgaccaggcctgccaagactctgcttacgtttctccttccccttccagtgccctgggtccttctctgccccagcctcagctgccgcctccaggaagtcctccctgattgcccaccccagcctgttctttaggggaatcctgcagggaaggttggggaagcaacccttaaagtgagggcagagcccgagggaggcccctgagactgcaggtggggagggcagcttggctcagcctggctgtgtgtgggactggggacaagcaagtcacacctatgactcgggctctgctgttccccatctgtctggccgttgcgtctgtctccaaactcccgtttgcatctctccatctgcctccttcactttgtctctgtccgtctctgtctccatgtctgaccctttgggacacacttttaacaggcacggagacaccagccccggcccccaaccctgtgatctgtgccccccgtcccacagctctgagcgctttcaccagcttcaaaaggcacattaattactctaatgaggtcaggagagacccacgctctgccatccggagtcggaacatgccgcagcccccagcccagccgccgccgccccccgctcgagcagggagaggggctctgctgcctccgtcccctctgcctgtcggggcccgtgctgcaccccacgttgctgcagagtaattggcagccccccaaggttaatgcactgttagccaggggttctcctgggctcagagccggagaggggcctgtcagcgagaaatgaaaggccccaggtcccggctggtgctcggcttgtgagcgtgtgtgtgcccgtgggagtgcgtgtgtgtgcgggtgcctgggagcttgcgggggcgggcagtggcttcctccacctctcccacgcagacacgcagacacgcaggcacccacaaaatacagtctcatagacacacggtaagcaactcggacagttccatggatgggacgcccgcagccccgtgggacacgcgatcacacacatgggtgtgacctgctcagctcctaaccccacgccggggagtgtctcagacccatgccccccacccttgcccctcggtgtgcccactggacaagcagcatatcaggtctgtgcctctgggtgggggggggtgggggtctctgcttcagcagcgggccccgcccaggctggagtccagtggactcactgcggggcttctccgcttgtgaaataggggcgggtgggcgctggggacgtggcctcaaaggcgggatgcgttgggttccttgcggcgccggcttgtgcccacagcttggggccgacattcatcctggggagatagagacagggctcctctgccgccctggtgccggggtgccccagggatgtggccccatgtgccaaatcacagtcactcgggttggcaggcgacggagggctctctgcctcttctgggggtgctgagacccctgtaccctcgactccccacctccagggatctcacccccaggtgcccatctcctctgtggggggcctgagccaccactgaccccacattaaggccactgacgtccccgtcctaggccagccagcccctgagaagcacccagtgctttgctgtgggacacaaagccacacatggctattcacgttatttcattaagttacataaaactggaggtccagggcctcagtcaccatggggagaggtcctcagtcgccatggggagaggtccgggtcctcagtcgccgtggggagaggtctggggcctcagtcactgtggtggacagcgattggtgggggcagggacatttcctttgtcttggaaagttctggacgctggtggtgtctggacactggagaacgggtctgtgttcaggccccagacctgaaggtgggatgagggagagaggaaggaggaggaaggggaggagggaggggacagagtgggaaggagaaggatgtgaatggagaggaaggatgggaggaggaaggaaggaaggagggaaggggaggaggaggaaggagaggagggtgcagaggatgggggaaggaggggggaggagggtgtgaaggggaaggagggaggagggagcggaggactgagaaggggaggaaggtgtaaaaggagagggagagaggaaggaagggagggggtattaagggggaagagagtgggaagggggaggagggaggggagggtagtatgaagggggaaggaaggagggaggggagaagggtgggaaggggaggaaggagagagggagggaggggaaggtgtgaagggaaggagggaggggaggtgggagggaagtagggagggggagggaggggaaaggtgtgaagggaaggagggaggggaggagggagggaggagggtgtgaagggaggagggggaggagggtgggaggggaggagggagggaggagggtgtgaaggtgtgaagggaggagggagggaggggaggagggagggaggagggtgtgaagggaggagggagggaggagggtgtgaagggaggagggagggaggggaggagggagggaggagagtgtgaagagaggagaatgggaaggatgggagctggggaggagggaggagggtgagctgggaatggggctgtgtgcctgctcttttccaccactggctgcaggggttgcaggaatcttgggtccatggctggatgggggtggggattttcatgttacccactggagaaagggatacatttttattttcaaggacagcgacccagcccaggggaaacgcccctggcccctggggctaagcgcagaccccagctccgtgcttcgcaggtggggggcgatggacagcggtggggctcccgccctgagtggagcctgtgacctgcccgggccccagcgccccgtgacccctgccgcctgatccttgcctggctgagatggggcttctgaaggctgccggcaccagggcaggcagcgcattgggtccaatttattctgtaatgagaaattctccccgcatatttttagcttcctcctggcgtcgcggcctttgaaggctgaggggctgcgggacgctgatcccaagccctgtggcctggccatgtgggcagtgggtgctgggcacgggctggacaagtcccttcctgagtctgggtagaccccagtcccagcagtgcagagcagggggcggggccagaccccatcaagccctgtactggctccagaccagggactgagggcgaccctggataacccctgaccttggcggacacctgttcccagagtgagcctgatttctgacccttggctccacaggaagcttactctagagtgacctccggccgcggctgcgtcccaaagccgggacagctcccagccccaggagggaacagggcttcttggacccccacagtggcccccctgccaggcaggggtttgccggggcagcctcgcccagggccaggcctcggagacgccctgccctcccctcccttccccaggtccttcctctaggagcggccagcgggcgcggggaggttgaatgggggacgcaccgcctttgttcccgtccctgcttgggctctgaccttgagagagacaagaacagaaggaaaacggagcttctgctcaaatccgttcagcggtggcggtggtggcggctctcgcctcggtggcccctgcatgcaaatgagtggccctgccatgcctgggtggaggtggtgcccttccagctcccacctgtgcaggtcccagtcctggtttgagaagagaccccctcctcccgaccctggcccacccctcctcacccacgagatcccttgaagcaggagggggcttctggtcccagggtagaaggaagcttccagaactcccacctttgccaggtggcatgctggggccgggcacgccaagaccccaggctcacggccccttgtcctgtgcttgggtgcagccgccacactctgctccgaaagtgctcacctccgggagtggccgtccccctccctaaaagagccccccaccagacggagccgcccgggaagcttctccagcctgtctgggctacagagccttgtgtggctagaacccaaggccctcactccaggggtgctgagagagcctgtccagagggcctgcctcagccaccacctgggacaggttcacgccctccactgaagagacacccggccagccctgggccttcgacctgggacgtctgtagtggggtcaggggatgagacctggagctcagaacagacgggctgagctccctggaggagagagaactgagaaccttgtcctggcagggacgctagagcactgggtgggacagacctttctggaagagcaagattttaacaggaagaaaaagtggaaggacttcccagcaggacccagcctgaacaaaggtcaggtggtgtggcccgcgtggcccgctggggaatcgggggaggagggcacgcaggagacacaggacagagcccaccacgtctcagagctgtgggacggtggtgggtccggtccccaccccaccttgctggggcacaggttagcttgcccatctctgggttcacggtccctgccaggagtttgggtaatgcctcacacagggaccttcgggtccaagggctgttggtgcttgccctgcagttccctctcctgcactgggcctggtgaatgacactaattcagagacgtacaacacgatctgggcatcgccagcaaagtccagccagcgtttgatgacagcctaccctccacaagctcagagtctggtgagggaggctgtggcatgaataagggcaaaaacagagggcaggccaggtgcagtggctcacgcctgtaatcctagcactttgggaagcccaggtgggaagatcgcctgagcccaggagttcaagaccagcgtggccaacatggccagacactgtctctatagattggaaaaaagacaaagcagaggccaggcccccagttccccacctgtgtcagcctaccaggaggagaaatcactcggcgttccctgaacagatcagaccccgggtctttgcacaagctgtgcccccgggcagcggccctcccctgcctgcaggattcgtgcgtggagactgatttgctgtcggccggggcttcactctgggcttcttggatcccatccccagctgctcacactccacatcggtccacctactatgctcccggcacccttagggctgaggtgtagggacttactccatccccagggaacagcgtgggtccggagaggcgactcccaggagggccccagggaggtcgcagcccgagcagctttggactttggccagcgcccctctgaaactctgccccggcccccgcagggagactggagttggccgagcccgatttgggacgcgtgcgtcggggttggtgaggctgcggatagcgctggaaccgggcaggtgagaggcccgggacccagggccgggccgggtggagcgcgtgggggcgcgggaggcagggtgcgcccccgcccctcggagaccccaggccgggccacgcggatgccggcggggggcgcgcagaatcggggtcgctgggggcaggccccgggggacgagcctgagacggggtgggccggggcagggggcgggcgcaggctggagacccccgcccagtccccgcgcggccggggcacggcgggagggggcgcccgcggccctcccgacgctcgggcgggacaaaggccggagcccgggcccctccccggcgggtgcggcggcggcggcccgcgctccgacagtccgcgcggccgggtcctgcgcccggggcgaccccggcgccccgccccgccgccgcctgacttctcggcgcccgaggtcgcgcgcgcggaggcgggggcggcccgggatctccaagcgccgccgcgccctcctcccgcccgccctccgcccgcccgctcggcggcggcggcggcggcggaggaggcggagaaggctggcaggcggcggccgggagagcgagcgcggcggccggaccggggccatggcgcccgcgcagcgcccgctgctcccgctgctgctcctgctgttaccgctgccgccgccgcccttcgcgcgcgccgaggacgccgcccgcgccaactcggaccgctacgccgtctactggaaccgcagcaaccccaggtgagcgcggccgcgcgcggggggcgcccggggaccccccaacgccccccaagccgcgcccggcctcgcgcccccggagctccgggcgccccccacgcgcgcgccgccgccgggatgcgggcgcccggttcccgcgggagccccccagggagctccggccccccggagtttgggggactcgcccttttcgcgcctgccttccccggggcgccccattgccctacggactgtggggactcgcgccccacatcccccagagcgccgacgtctcctggagtttggggaacccctctggtaccctccgatgccgggtagcccctgagttgcctgcctggacttggggggacccctgatccacccgcttctctggggagccccctcggtttcgcatttggtggggatccccggggaccttggcaccggaggtgggggactgtggccctcgagggatctctgggttcgtcctgcccgcaggtccccagatgaacttggggaagttggagtgtccctccctcaggacccagcatctgcttcactccagggggccaagggcccagctttgaaaggagactgaggggccggggagctgggggtcagccccgggaggggcagtgggatggagtcctctcttgtcctctgggcgctgaccaggaaactgaggtgcagaggggatgaggagctggctcaaggtcatgcaagggggggacttgggggcaggacccaggtggcccagtgccctgcctgccacgcccggccgagatgccgcacccgcctgctgcaggcccccttgttttgaaccaggtccgggccaggcacaacgtgggggacaggagaagcccccgttggtcagagcaaaaaaagtttgccggggcctggccatggcctggacgtgggtagaaccctctgaaccatcccagggtctccaagacaggagcaggctgcagcttccctgggggtcccgtgggagccggggctttgggggtcctggggctcgggagggagtcagccccagcactcagggtgtcaccgtcttcctaaggcacacggagctgcacatcgggggctgaggcggcccccccccactcttctgctactggtcactttctctccgttttccagccgcttcctgtgccgaccgagccgccctctggagcccgccacccctccttgtcccctctgtctcctgctgtcctcggtccccgggaggaaagttgcatgaaggggtctctttgaggcgggctcggggacaagggcggcccgtgttccgccgtgggggtggggaacacgcacaggcccaccccccaccctggtcaacggcctcgggtcgggccctgggggctgagggcagggaccccgggccgctgggggacggctggcccacctcagagcgggtccccgagccgcccgctgtgctggtcacatgtgggtttgattaaggctgtcgctggccgtgcggggagtccagcgggcagcgcttccccggcccaagtttttggtttcagctgcggaatctcccgtccccagcgtggcctgtcctttgttctagcaaacgccaaacacacgaggacccggcaaccgggggaggaaggtggtcaccagggccgtcctgctgccccacctgccacagggctgtgggctgcgggccggacccccggccaggggaaggaagtggcctccccagtgcctggcttggcccagccacctcctgttgctccgggtctgacctggttgcccagctcaaaccgctgcctgagggaacggccttgctggtccgcagagccgacctgggcagcaccgaggctgcctcctccttcctctcctgcctgcggtatccagggttgctggggacggagccgacaccctgcagtggggcccagggctgggtgagcaccttcccgggaagccgggatccagccagaatcagggctttgtcgcggacatcaggggtctctgcagttctcagatttggtgtccaggggcacctgcccgggacctgtgcctgagtggcgggggtgtcaggcacagcagggggtggtgctgggcctccgtatccaaggggaccctgtggaggggacatcggcttggggagaggagtggcgtcagccggcaggcctaaggtgtgaggctgggctggccggggagggatgatggggtcgggcaggtgtgtgggggatgcggggaccccaagtctttgagaggggcatacagaaaggcactggagacggggacagccgcgatggggggcagacagcagcgtgggcaccaggggaccgtgtgctcgatggggcctgcaggcccgggcagtgccgcagcgtcgccggccgccccttccgcccattggcctggcacctgtgcccaggcgatgactgtgtggtctgtctccacatcacaccctctctgctgtgagaggcgatgcctgcacccaggggaccccgcacccacctccttgggccgctataaggtggggccccgttgggtggtctggctggccggccccgccactcccaccggtgactgcacagcgtccgtccaacccactccccaacctgggctgggtacccctgagctggccgccaggagtctctgggcctgttcccagccgacccgcatcgggctggggcgtccagggcttggacctggccggctgccctcacctgtcctgttggacctggccggctgccctcacctgtcctggccacaacaccgcgtgtgcattcccacggctgctcatgtgtgtttgcgtgcagcggtggggaagggtggcgtgcaggtgtgcctggagtcgcatccggctgcaggttacatgtgtctgtgtgtggcaggaggctgcgtgaatccacagggcacagctctggcgtgtttgcacatgtgtctgcgtgattgcatatgaggtgcatgtgtgtgcatgagtgtgtctgtgcgtggcacccgcgtttgcatgtgcgtgcccttgcacgggatgtctgcagtgtccgaggtccctgtgcgtgtctgcctgtggcatgcatgcgttttgtctgtgcgtggagtgcaggtgtgtgtgcgtgtctgcgtgtggggtgcatgtaagtgtgtctccctgggggcagtgctggctggctgagggcctgcaatgtgggggcagtggtggccccagcacggtccacaatggcaaccccgctgttggccctccctctcctcctcccctggggacgggaccagggcccgtgtgcagacggccatcaagcctcagagcagggtggacgcaggggcctgtggtccccgggagtccccaccttctgattggaaatctgcagccttgggggcactgggtgggcgcttgcccacactgggcatctctgggcttcggccaccctcccggggttccccacggacccagtggccctcgggtgtgggcagcagccgggttcccctcaaacactggatggaaaatggtgacctatgcaagggctcactccccgagggaggagccgtcccccagcagagggcagaggtgaacggggtgtctcgctccccgtggctccgctggcgtccctcggcctctcggggagccggctttgaagggggtgatgccgtgttctgctgcataagggttttttgttttgtttgagagaagctggtccactcggcattgggggcgctaggagagccgggcggtgggcctgggggattcggggcctgagggtggggtcctggaggccgtggggtacctggactcagactcgggagtctgggagacctgggcatgacgtcaggcaggtggcttagcagcctggaacccccaggcctgctctgcgaagtgggggtgacggagccctgcggtgggtgcggctcggccgatagggcctggtgtggatgggcaaaggcctgagggtggtcccaggggttagtgtcccctccccagaagggaaaccgaggcagctcctgtggtggggaggatgcttctgccgaggcaccatggtctctgtgtctcacggtctctttgggtctctgtcttccccatctctgggcatcctggggtgccatgggtggcccaggccttccgcctccactgcaggcctccctgggcggcctcagtttgcagagaagggaacagaggttccgtggcggggggccgtgaacgcagtgggatttgaccttcccccgtctctgggctgacgtctccgcaggtctgcaggggactggccctacgtgggtccctcggggtcacggcggaggcagtgggttgtgcattcatgggggtccgggtggtagcgtttctgtggagccggtggtctccttgtcatccatgagggtcctgccccggtggccgtgtgttccccgggacacggcttctctcctccccaggaaccgggatgcagccaggccttgcccctcagtcctgtgtgtgggaccagcctctcctgcagatgggtcctcagggagagctgggctttgtaccttgctgggggaagggctgagctgctcccgtccctgtgcccaccgtcccgtcgccccagacacgcggctggagcctgcggaggagcagacgagccggcggggtttttgctttaacctcaagcaggcgtttgaactctgtggccgagtcggtcctggtggggggctcgtgccacacctgctcccagaccaggctggtgtggggtctggccgagagactcagcggcgtgtccccccagctctgtgcgccccttgtccacctgccctgtgggtcaggggcccccaattcagggacagagcagccgaggccctgaaagacggtgactcacccaaggccacccggaagttgggcagagtccagggtgtcccacctggggccggcccgggggaagccagggacagccctgggaggggcaggaaggtgggtggccgacggcagctgcactctgtaccagggccacccacgcccacggtgacggaagcccaggtggggctgaccctgcccggcccatctttttcctattttgcttcatttctagggccctgcctcagtttaccctcctgcaccacaaggccatacttgtcctttcttgggcagaccttgcaccatcccggggactgatttcccttcaggtcccacccaggtcctgagcaggaggaaaagctccagtcctcagtcaggggggacatctcttccgtccctggaaaagccaggtgtgggtgctgtcaccccagcaggtcttgctgggggtggcaggaggggacgggcggcctcagccccacgctgggcttcaggacccgggctgcctgctcatccggccagcctgggcctccccgggagcttctccaccctggaagagagatgcagacgggtgcaggcgtccacctgcccacccacggggtcctggctgccggccacaccactgcctcagtttccagtcctggaaggcagcccagcccacccccaccccagttttgggtgagattcctaattagtcgcttagctattagcgtctaataacttgacaattgcccgattggagctaattagctccaggccgcttgctggaagctggtgacagccaggaggcccgggtgggcaggaggggagccctgctgggtgagcctctgcctggggcctggagggctgcctggaggcgtggactttggcacccgcaggttgagtgagtgtggggggaaggtgtggcccggcagagggaacccggaggagtaaaaactgccaccgctgctctgtctgggaaaaatcccaaatcagtcattaaccccttagtgagaatttcagtctctctgccgctccggggaggatttgcatatcgaggcttcatcactaatggaggaagcgaaggctttgtctgcctctccccaggtgcggttttggggtgggggccccctcccccctgcaggcgccaccctcaacaggggcaacgcgcccacctcgggcttgcccgccaacttggaaccgggaatgccaacacagcaaggccgctgctattttagagacgcaaagggaaaaatacggccccactccggcaggcagagccgggggtgggggttcccctgggacctgccctccaacacacacacctgtgggctgctccccacaactctggcattgcaaagtcctcgcctcttgacctttttaattcactcattattgagcaccactgtatgcagggcctgtgtagggccctggggaggggacagaggaggccaacatcaggatccgggattcagacagcaaaccctgtaaagagcagatgtgatatggggcggggcacagggaacagcactgcaggcagtgggaacagcagctgcagaggcccttggtgggaacagggacagccgggaggctggtgtggctggaagggaggagtcttggagagaggaggatgaggagggcgcagtggatgggccacacaggcctggaggggtgtggattttattctgaggatcaggaatggatggagggctctgagccgccgccaacgtgttacagggtctgttttgcagaagagcgaggcttgggatatggggaggctgggccccggcagaccctcaccgcagcctggaggggcccgggcacctggccgctcagccacacagaagcctcggtctctgacattttaccgaaggcagaacaggaggagagaacacagtggtgtcagacgtgggggaaggaggcaccattggggaaccaagaggccagagggggacctacagggctggtgctgtgggcactttcagaggctgctctgtctcaagaagtgtcctgctaggagccaggttctttttttgggttgaatgtggctccctggggatcactgccgggacaggaggggaaactgaggccagagggcagtggggagcccagacgcccctgtggtccctccacggaggcctcccctgcagggtgacctgggtgtgggcagtcccaggcgggagctgggccttggctaccatcgaccgcctgatcaatgggctttcacttgggctgggcaggaacgaaaatgacttttcaaaaaggctggagcagcttctgcatcgatcgtgcccaaggggccagcgggtcaatgagatgcctgtgcccggccggccaatggggcagcctgaggggtgggctgaggccgagcccatctccatctgagcctgtatgggggctgcccccgtgtctgtgcggacgcaccccgagtgtccaacagccgggaggaccatccccttgcacggaggggaaagggagcctctgagaggaggccggacctcgagacccaagggttcaaatccagacgcaagcccagaactgcaagattccgaagccccggaagggcccctgccctccaggcctggtgcccgggggagatttccctgcaacacgccctcccatgtcccctgtgctgggctcacaggggtgatgaaggaggcctgggaagctctctgtccctggacgaatccaaccaggtagggaagggctggagggtgacttcaccgcctccgccgccctgccttgaaattctttgctctggagatcttcatgccggatccctagtggggaaactgaggcgcaagtgagcacacctgtctgccccttctcacccctggagacccaggaacccccggccccgcctggcgtggcatctcagggtggcggggggccgggctgatgccatctgataatcccaccaccctctctctcgagctgctgtgccaattagtgcccccagtgtggggcctgcggcgggctcacccctgcaggccggggtggcggtggctgtgccgggctagaggcagtgccagggccgggatcgtagcagcctgcacccatgtgctgccaacactggtggggcctcagtttcccctgcctgtgcatggagggaggaggcaggagcggtgtgggggaccccccattcctccctgttcaggtcttttatgtgctaataagcccctctcagggcccccctcgtgccccgcttggtccaggccgccggttacatgacaggggccctggggaccacagccgggagatctaagggctcctgccgccatcgcccgaggcagtgagggaaggggagccgccggtcccttcctcggctgatctctatcctcacagacgaggctgggtcagggggctccctggaggaaggggcctgtgggttgcgtctgggggacctcagggcaaaggcctggaggcagggctgggggctgaggtgtcaggagtgcaggcacccaagagggagaccaggaggccgccggattccggggctcggggctcgggaggtttctgggttccagatgtgagagggtggtatggggctcgcagggtcacacaggaaggcaggggtggggctgggagtggagcccaggatgtctccgagctgggcggcaggtggaactcggcaggctgagagagagggggcggtgggcggaactctgggggtgctgagaggagggtggagggattcttcacgccaagctccgttctctttggggaaactgaggccagggtgggggcagagcttgccccagagcgagctggaatgcccgacctgtgtcccccacgctgccccggtccttctcaacaggtgggagtgcagaatgaaagcagggctgggggctgcctggaggaggcggcacagatgttaagcatgttaggtagatgcgaagtttctggagagggaattcttgtggagggacagctcgtgcagaggcccggagtcaggaaccccccgccggccctttgcacacaggggtccagatgtcacccacctggacacccacctcgctgctggccctgccgtggggctgttggggacactgaggcaggaggtggggggcagtgccaggcaagagatcgtgggctcccaaccttggaagcccgccgtgattggggtgtgcaaccccacctgctgaccgctatcaccattcagggcccaggcggagtccaccttgtgaactgacccctcccccattccccggcctgacttccccgtgcacctgtcccctgacccgtccctccccgctcaccctgtcccgtgccctgtgcacctgtccccggagccatctctccccgcgcacactgacccgtgccccatgcacctgtcccctgaccctgtcccccctggcgcaccctgacccgtcccccgtgctcctgaccccggccctcgccgcgcaccccgacccgtccctcgtgctcctgtcccctgaccctggccctccccgcgcaccccgacccgtgccccgttcctcgctccgggcgctgacctctggccgccttgtccccgcaggttccacgcaggcgcgggggacgacggcgggggctacacggtggaggtgagcatcaatgactacctggacatctactgcccgcactatggggcgccgctgccgccggccgagcgcatggagcactacgtgctgtacatggtcaacggcgagggccacgcctcctgcgaccaccgccagcgcggcttcaagcgctgggagtgcaaccggcccgcggcgcccggggggccgctcaagttctcggagaagttccagctcttcacgcccttctccctgggcttcgagttccggcccggccacgagtattactacatctgtgagtggggtcgggccggggctgccggggcccgagtgggcggggacgcgggggcggggccaggaagtgggcgggaccactggggtggggccggggagtgggcggggcagcgcagtgggcggggccgcggtgtggggccaggggggagtgggcggggccgcggaatggggccaggggggagtgggcggggccgcggagtggggccagggccggtgctggccactgacccaccccggtcactgaccccctccagatgtcaagtgcatgatggacgtgccattctcccaaccatcccgggaggccaggactttcctcgtccttcgttgcatatggggaaactgaggcttggagggggactgaggctgcactattgtgatctcgggcctccagctcagaccacttggtggttgggccagtagacctggctcagccccccgatagcgagaccagggtgcccgagccccagcacactgatgagggaaactgaggcatccggagcccagcaggggaggggagcttggtggaagccacagctaggctgagtgctggggcttactcctgcaatcccagcactttgggatgccgaggcgggaggatcacttgaggccagcgtggacaacgtagggagaccttctctctacaaaaacataaaaacaattagccaggtgtggtggcatgggcctgtggtcccagctgtgcagggggctgaggtgggagggctgcttggagtgcatgagctctggtcgctccactgcactccagcctgggtggcagagcgagaccctgtctttaaaagaagaaaaaaaccccacagggcccctgccgcaccagccgcacccagactgggtaggggtctccaggtcctccctgccccgcacccacccccgcatctccccgggacccatgccaggctcggagactccctgaggaccgtggggtcttcatctgaaggttgggtggcggcagccttggggatagtcacatctgcaggaccccatggtgggccaggctgggtgggccaggctgagggaggctgccagtccctgctgcttatcggaggtccgaagctggcctttttgtccctacgaaaggccaacggcaggtggggaacacagcagcgccagccggagtcccagtcctgcttggccatgatatctgtgaccttggcgggggaatgaggggccaggcactgcccacctgagatggggatgatggcatcacactcgtggcttccgccgtggcgctgagactgagggattctcgtggagtggggaccccggcttctcagcatctcggggcctgagggatggggagtcagggatctggggtctgtgcccccaggctgcaggggggccagtgcctggacacccagctcctgctgtgtgaaattaaactttacaaggccccattgcctcctttctctgctctagttggatttttcccttttaattcagggaagaagcgggtgggggacgggggaaggtgtttaaattaagtccccataatatgagaaaaattacatttttctttctgagacggcagtttcataaagataattattgtaattattcgtcctacctctgtgatgaatgttatttttattacatgctttttatcttcatcttccagtgtgaggggtttctagggggcgggcagaggtggtggccatgagagccaggccatcaggggcccagggcccggcagagacagcaagaccacatccatgtgtgcgtgcacatggacccacccctgttcgattgtccacacgtgtgcacaccccagcggccccggcttcaggcgtccttttcctcctctcttgatccttgcagacgcccccactgcactccaggatgcttctgggggcccgaaagcaggggcggtgatgctggaattttgggcgtaagaaccagttggaaataatctttcccagccaggcgtggcggtggctcacgcctgtaatcccagcactttgggaggccgaggcgggtggatcacctgaggtcaggagttcaagaccagcccggccaacatggtgaaaccccgtttctactaaaaatacaaaaattagccaggcatggtggcacacatttgtaatcctgtttacttgggaggctgaggcaggagaattgcttgaacccgggaggctgagattgcagtgagccgagatcgtaccattgcactccagcctgggcgacaagagcaaagctccatcacaaaaaaaaaaaaaaaaaaaaaaaaaaagaatctttcccagagaatctactgtgttgccaggcgaggtccagagagggagcggcttgtccacaggctctcagaggcagagatttgaacccaggtcaatcatttcactattaatatatcacctctttgctgattgcttgaaaacaaatacatcattttccgagctcaccctgtgctgccctggggtgaggcagagcagaacaaaaacacagacacccccaggttctggggtcaggattggacagaaggaggagcagggggaatgtgcaggagactgctgggaaacagggggcattgtgtctggggctttgatgtacgattaggagttttaagggtggctctccacctggggtcagggttgattcaccaaggtggggaagggagtacagccccaggaggtctcaggcaccaagaggcacttccccactcatccccatcccctctcttctagctgccacgcctcccaatgctgtggaccggccctgcctgcgactgaaggtgtacgtgcggccgaccagtaagtgctcagggggatgggcaggatccaggcccccacccctgtgtcctaaacccacagaaccagtgagtgttcagaagagccaggacagggggcctcgggtttccctatcttgccctgccttgccccagcctcgatttccccgtctgatgaacatgtcagaccttcgagagtgaaggttagctgagcgcagtggctcacgcctataatcccagcacattgggatgctgaggtgggagaatcaattgagcccaggaggccgaggctgcagtgagcagagatcacgccactgcattccagcctgggtgacagagcaagactctgtctctaaaaaacaaagcaggccggttgggtggctcacgcctgtaatcccaactttgggagcctgaggcaggtggatcacctgaggtcaggagtttgagaccagcctggttaacatggcgaaaccccatctctactaaaaatacaaaatttagccgggcctggtggcgggctcctgtaatcccagctactcaggagactgaggcaggagaatcacttgaacccgggaagtggaggttgcagtgagcccagattgcgccactgctctccagtctgggtgatatagcaagactgcgtctaaaaaataaaataaaataaaaataaaaataaaaacagagtggccgggcacggtggctcacacctgtaatcccagcactttgggaggctgaggtgggtggaccccaaggtcaagagatggagaccgtcctggccaacatggtgaaaccccgtctctgctgaaaatacaaaattagccgggcgtggtggcacatgcctgtagtcccagctatttgggaggctgaagctggagaatcgcctgaacccgggaggcggaggttgcagtgagcccagattgcgccactgcacgccagcctggcgacggtgagactccgtctcaaaaaataaataaataaataaaaataaagcaaaaaaaaaaaaaaaaagattaaaagagtgaaggttgaattcaacagccaggtcccccacttcaggccaagtgactttgcccggagagtgggcatcggggatggcaccaagagggagcagagggcctgcctggtggggtgatgagcccgttgggcagatgtgcaccctgagggcgggcggcacgtggggagcccagtggggttcgggcggccgctgagcgtgctgtctctgccacccgcagacgagaccctgtacgaggctcctgagcccatcttcaccagcaataactcgtgtagcagcccgggcggctgccgcctcttcctcagcaccatccccgtgctctggaccctcctgggttcctagtcccagccccgcaggacgccgaccctgcctggacggccccgcctggaccgcctgacctcggccctccggacccggctgcggcccccgcctccgagaccaaatagagacgctgcttctccctcgcctggtgccgcccccgccgggcaggggccatccacccgccccaggaccagccctcagggaggggaaacggccgagagcccccccccggaggcccgaggggccggggtgtggatgcggaccgtggccaggccatctcctctggggcgtcggagaacccgggaacctcttggcgatttttttttttttttttttttttttttttttttttagtgtatttttcgtggttggatcaaaaagacttgagtttttaatttaatttattccctgccgttgtagcggggcggggtccctgtgccctggcctgggggaggggaacgcggaacatggggtcgggaacacagccgctcccctctgctctgcaccccactcgtgggggaacacagccgctcccctctgctctgcaccccactcgtgggggaacacagccgctcccctctgctctgcaccccactcgtgggggaacacagccgctcccctctgctctgcaccccactcgtgggggaacacagctgcagcccaccgcggacccccctggtgctccaggttgggtgagtctgagccggaaggggtacgtggtgggcgcccctcattgtggctggggagacctcataccccatcgcccacccccgtcctcctggtcatttcctcccagacactgttttgccccagcgcccttcggaatcacagtcccgccgtgtcttagaaactgctttggccgatgcaaacagccccctacccgtccccctcgcctcacacggtccctctccgaggccgagaagaccttctgttcctgtaaatacagccagcaagtgcaaactgtgattttattttccacgtattcctgaggacggactggaccgtctatgttttttcagcccttcatagggggtcttttattttggtgggggggtggggtggacttttagagtagaagctgcacttggcaataagctcgtgtcgtctgtcagagcccctctctcaactctgtgacctgataatgtttctaagaaaaagaaaaaaaggacaaaagggagggaaccactaccaaaaaaaaaaaaagaaactcctccccgaagacactttaatgaaggaaacaacacatttatacggatttcatatttctacccgcctttcctgactctgtgttttatatatattatatataaatatatattgtgtacggccgccggccggcggctcgaggcacgcccggtggtggggggtgggcagagggcttttgtagggggtcggcggggcgggccgcgttgccaggcctggagctggcgaccgggcctccctcttcccgtcacaatcaactttggattctgtatttttttataataaaatgagcataaacctcaaacgcgtgtgtctgtatgtgggggccttgccctacttgaaggagacttttgcattcctaatttggcggtggatgctgggcgtggtggtttactcctgtgattgcagcactttgggaggccgaggcgggcagatcgcttgaggtcaggagtttgaaaccagtctggccaacatggtgaaaccccatctctactaaaaatatgaaaaaaaaaaaaaaaaaagccaggtgaggtggtgcacgcctgtcatcccagctactcgggaggctgaggcaggagaacctcttgaacccgggagttggaggttgcagtgagctgagatcgtgcctttgccctccagcctcggcaacagagcgaaactctgtctcaaaaaggaaaaaaaaaattagctcggcgtggtggtgcacaactgtagacccagctactcgggaggctgaggtgagaggatggcttgagcccggcaggtggaggctacagggagctatgatcacaccactgcactccagcttgggcaacaaagcaagaccctgcctcaaataatagtaatagtaataataataataataatttagaggtgggtctggaatctactggggagaggggtgcggcttcgaggaacctctggggatccccagagctgtgaacctgactgattctttggttctgtgcatcgttttggggtcagaccttgggatgagcattttatagggcccgtatccttcatagccatccatgggcttcagtttccctctctgggaagtagcaacagcccacctagggctgggagggggcagctgggaggatggagggaggagacggggcctgtgcatggctggccctggggacaccgctggccggcacacacctgaacatggtggaattc

SEQ ID NO: 6 - DNA, 172543 bp, Homo sapiens
gaattccaggggggtgagtggggagggtgggcctgcctgtgtcactggagctgggatggtgacagagaggccgccccgggcctgtcagcacggacgggcagctcactcccacgtcatggcactatgcgggtgacttgccacagcttcacttgaggcgaggtgccgttgggggccttgcgactctgaggccgccggtcagcagatcaggtattctggaacagcccacggtcccctgcctggctccccctccacttgggcctcgggacacgagtgaccaggcccccacttctccaggaatccgcagcccagggaaggttgtgtcagccaccaggccacaggagcagcctctgcccaggccccccctcccccccgcccccagttccagccccaggtcttcaagttcctgccaggccaccaggaccctataaataagaccaagggcacagctgggacttagcaggggcccagcgggaggagctgctcactccggggacctcccctgcccccaccaccagggagggtgtgaaccttggagccaggcctcaggacacccgagacacctgacactcggagggaacagcccgtgctggctggatgcgtcctggagcaggaggcagtcagggtggggccgggaaccaggcggtcaaggcccttcagtgagggcagcccctggcttagtgaggcagaacagagcacagggtttgtccccatcacacccaggaacaacccactcaaccatggggacgccgagtatgggaaatggtggggaagcgttttagcatgtttattcatttagactggctctgggcatctggtccccaaagggccacacagtggcccctgtgaagcccagcaagttccgacaacccgtgtcccattccactcccgaccagactgaggtgatggtgtccattccactcccgaccagactgaggtgacggtgtccattccactcccgaccagactgaggtgacggtgtccattccactcccgaccagactgaggtgacggtgtgcaggtggcagagccacacacgagaggcaagaggcagggagggaggtgggggctgctggccactcacagggggccccagtgtcctgcttgggctgctcatttggcaccagtccacggctccctccgccacctttgttctcactggaagcagaatgagcctggccctgtagttcccacctggggccccagcccttcatccaagccccattcatcgaccctgcccctcctccctccaactgggtccagttcactaagctcccagaactgctcaagccattcccacttcctggaccatcgtcttttttttttttttttttttttttttttgagaggagtttcgctcttattgcccaggctggagtgcaatggcacaatctcagctcaccacaatctccgtctcccgggttcgagcaatgctcccgcctcagcctcccaagtagctgagattacaggcgcacatcaccacgcctggctaatttttgtgtttttagtacagacagggtttcaccatgttgatcaggctggtctcgaactcctgacctcgtgatccgcccgcctcggcctcccaaagtgccaggattacaggcatgagccaccgcgcccggccttttttttttttttttttttttttgagacggaatctcgttttgtcgctcaggctggagtgccctggcacgatctgggtttattgtaacctccgcctcccgcgttcaagcgattctcctgcctcagcctcctgagtagctgggactacagacacatgccaccatgcccagctaatttttgtatttttagtagagacagggtttcaccatgttggccaggctggtctcaatctcttgaccttgtgatccgcccgcctcggcctcccaaagtgctgggattacaggcgtgagccaccgcgcccgaccgcatcatcttttttatgtgacaaactcctagtcattcctcaaaccgcagcccctgtgacccccttccaagggttatcccagcctctccctctctggcctagccctgacccttcggggctgggtgtgcctgtcaaggtgggggccacggctgccgggagcatgggtggcagccggaaggagacctggggaggagcgcagccctgggaggggcgcccatggccagggtgggggtggaggtggtcaggccagataaagggaggggccagatgagtggacaggaggtgctcccgtaggaatggggtccccttctctaaatagaggggcaggacggggcccacctcaaccaggaccatcctcaaaaagccgacggggaagggtgagatgcacaccacattcgtgtctcattggctgtggcctcagtttcttcatctgtaaaatggggtaatgcccaccccaaaggctgggaaccagtgcatgtcctgcattaatggggggtgatggccccaaagtgatcctgccgcatcccctcaccacactcccacccaccctggagaaactgaggcttggagaggccagttacctcccggggtcacagcatagccggctggtgactggctgggcacaaggcaggcctggcactggctaatcgctccataaatgccctctgaggtcaccattgacagatgcaggaggccagggctggccagggcacccccactctacggcaggtgactccagcctgttttcctggacgacagccgctgactcaggcccctcttcccgtcccccccacgcgggcgcccccaggcggaagcaccgggcctggggcgacaggaagggggcggggcagcgagtcgcgctgtacaccccaaaaccctgtcccgctgacgattcggggtgcatctcagcccgcggcgaggcgggccgagacccttggctcggggcattcaaggggagtccccccatgaactgcgccaagcctgggtcccgggtggcccagccgtcaaggcgccccagggccagggccggcaggcaggggcgggggccagtctgcgtcaccgcccgcccggccccccgcccccctgcccgccctaactccaccccgagggaaggcggcgcggataaaggctgagggccgcgcgcttggcccagaccggcccggccagcgcgcattcggccccggacgaaggtactcgcagcacttggagcgcagaaccggccgcgcccggtgagtgtggaggggggggacctgcgggccgaggaagggtgcccactctagatggctcaggatgcccgcacttttctttgttcttgggacaggagggatcggggagcctccggtcctgggaagccccccggggtgcggggtgggaggggctccgcgcagccagcgccgccctggccggacctcagcccccgccccgccccccggggcactcccccttcaccgcgggtgaccttgaactggttgccgttccgccctccgttgcccagccacacggtcccagtctcccgactacagtctttcgttcccgatcggggttcctcccccgcgcgcagcccagtcgtcttcctcccctgccaggggcagcgcggcgccccctccccgggactccgggcggcgctcccaggcgggcccggcagagggcgcgcccgagctgctgactcaccgcatccccgagcgcgcgcgggcgcagccggggacgccgcgtcacgtcacggctcgagcgggcgcgcctcggggaaacgggttctgcccgcggccggcgggtgggcgcgcggggcccccggcggcagccacccggccacgtcaccgaggtgcgggcgccccgccccggccacaactccgcccccacgcaccacgccctccccggggccgcggccctagcctcaccgtcgcccgcccgccccgggaccccggccacgaggcgcggacttcgcgctcccgcttccgctcgcggcttttcccggacgaaggcggcggggtggccccacgacttcctgcccctcccggcgccgggaacaatggcccgcgccccctcccgctcccggccgctcccttgggatcgcgaggggtaccagacccgtctccagacctgggtcccgcgccccccggggcgcgcccgccctttgttgcgggctccgggcgcttatgaatggctgcgggcgcgggcggggcgggggcgggcgcggagaggcgccagccccgcccccgctgcgctccccttggtcgcctgggcgctgggggcggggcgagggggcgggcccggctgccacgtggggcggtgccgcggcggctctcataggcccgggctcgcggccgactgggcgctcggcgcgcggcgattggccggcgcccggccggcggagtaagtagtgaatgggagggggcggcggccccgccccctggaacgttgatacattataacttttttttcttgttactttcacccccagatcctccgagcggcggcgacggctgttgctaagggaggggacgcgcgaggaagcgcgacccgggcggcagacggcacccagcgccaccagccgagcggcgccccctccccaggacccttaaccgcgccgcgtcccggtcgcgcccgccgccctttgaaggagaagcaagtgccgtccccacccccggaaggcgcccccaggagccggagcgacctcggagcgccactcggattttggatttcggtctcgcattccgcggccgggactttctcgaggaggacgcgcgctgctccgcgcccccgagtgcccggaggacccggcatccggggagcctctcgcccctgtcccggaggcgcggcgaggattggcggcgcccgccgcccccagccccccagcgcgcgccggggatggagccgcagcccggcggcgcccggagctgccggcgcggggcccccggcggcgcctgcgagctgggcccggcggccgaggcggcgcccatgagcctcgccatccacagcaccacgggcacccgctacgacctggccgtgccgcccgacgagacggtggaggggctgcgcaagcggttgtcccagcgcctcaaagtgcccaaggagcgcctggctcttctccacaaagacacgtaggtaccgcgcgcccccggccggccgccccctcgggccccggcccccgggcgggaacaaagagcgcgccgcgcggggaaggcagggggcggccagacagggggcgggggcgcgccgcgcgctctcgggcgccctctgctcggcctcgcctgcctcggccccctcccccgcccggggtcgccgcacaaaggcggctgcgagggcgtcccgggccgggcttcggcggccccccttgggggcgggcaggaatcccagggcgttgcgggggtcccggctgcgggtgtgggggccgccaccgccccctcccgcctgcgtccgcgccggcttccgcatctgctcggcggcctcctctgcgtctggctgtctccccccacttgcgtctctctccccccctttgttctcgcctccgagcgctccccgcagcctcccctcccccctggtatttaaatcgcctgcaggcccggagccctccccccgcgggcctccggggacacgcagtgtccatcccagtggaggggcccatcgggggaggggcggagggggagggtctcctttgtctgcgcggcggcggccgcctgcgccggggagggaggaggagggggagcccggcccggcgcaacccccagggcctctcctcgggccgaaacccgtggttcctacaaagaggagccaggactagaattagggaattgggggcaggggctgccctggggtcgtgggggaaggtggcatagagcacactggggcccagaggaggagaaagtgcctggttggggtgcagagggggtgccagagtccagggcgggggttccactggagggaaggggtccgaatcgccaggatggggctcccagcaccagacggagacctctctgcacgcgcttagggccctggatctggaagccgggaaggggtgggggtgggaacttatccgtctctccccacacaagcacagccctcccccgcggcctctgcttccgcgtccctgtgtcgtctccgcggagtctcatgctcttccttcctccccccagccggctcagttcggggaagctgcaggagttcggcgtgggtgatggcagcaagctgaccttggtacccaccgtggaagcgggcctcatggtaaatggccatggggctgcgtgcccccagaggcccccgcacacaggcagtagcccctccctcggtacctgtccgcacacacactacctggggcccccaccccgccagccagcagggccctctccaccccctattccagcccaggattccgaccccacactcaggcccctctcctccctctctttgtagtctcaggcctcaaggccggaacagtccgtgatgcaagctctcgagagtctcacggagacgcaggtaagacctcgccagccccttcctaacagggcagccctgggagcagggtgccttggccaccgacggggcctgggggttgtctgtgctcccaggaggctgggggaggggaggggacgcgccaccccgcctgggtgccagcctggcctggcctccccacctcctctcccccaagattcaccacctgacccggagggctttctctcccacggtggctgccctgggggaagggggcctggctttcacaagactgcctgcaggatgaccttggcctatggggcctcatccccgctcacaccctggcctgcatccccagccccctccgcccccaccgaggagcccccctccagccgctgtggcttccccagagcgagtttctccttttttacatttctgctgagggctgggggtggcggcttgggtgacactccttccgccttccgtgacccccatcgtgagagggtggggatctcgtcaccctcccctcctctctctggcctttgttctctaccccgaaaggggagggggcgggggtgcccagccctggggccagtgaggcctagacaggatgttaggaaaatatttagtaagcggccaggagggaggctggggctggccctcacccggttcccggttttgctgcggacttttttttttttttctccttctttcctcattttcttggctgcggccaagccttcctcagacaagggccctggccacctcccaggagggtgacacaggcctcagcaatccgcccgctgccagggtgggggacgcaggctgccacccgccccagcaaggggtggccggcttcccgggcctccctggccccgaggcccgcacccccttccgctttcccagcggcatgtagagtcctgccctttccctacatcgcgggggcagggcgggggccgggagctgggtggtctgccatgggggtggccacagcagcagcagcagtggcgtgggggcagagccggggtcccgagccagggcgggggctgcaggtgatttcctggggcgagtgtgagcagagctccccgccgctggggggctgcggttggcagggggcccagggcgtgttggcttcacaccctcctccctgggcgcctgcgtcaggaaggagctgggttggggggggctggagggggtgctgggcggagacactgggctccccagggttgcttccctgcctggcaccgagtcatgcccgcccattagccttccccagggaggaagttgcagggcgggtggtggtggggactccagctgctctcgggaagccaccccgggcccttcctgcaaaggctgtcttggggcaggggggtagggggccgggcaggctgggccgcagggtgggggcttcaccctgccctcctccctgcctccctccccatgggccccaagcagagaaggttacgccagctactgccagtggagaggagagccgggagggagagctgggaggcggtcggttctgagtcatcccagcctatgtcacttctcagaaacctccgccacccccccccccatcccggccactggggagagcagggctctggcccatacccagagcagggggcttggcgaggacagggtgagattcaacccacacccaccctgaacgggggcagattgagggtttctgtgcttggagcaggttgtgccctccgggactccagccccagggcggtcagggccccttcctgcagccttgccacagccccctaggcctccgccccgcccaggacagataaatatttatcttgagaaagcaaaggttaggacagaagaattcgtgcaggaattccacccacttgctggccctggtgacttagctgggagggggcctgaggtggagcccctcccgtatccacaggcagagaggatctaggggcccatgagggtgggggaaaggcaaagtgaaggttgtttgaggtcagtgactgccagctgggccccgccccctctggcctcagtttccccttgcaagaccgacctagttggccagggaggggcaggcccccgtctgacccgcctctgtccccacagcccccagcggcgcccgggccgggccgggctggcggaggaggcttccggaaatacagattcattttatttaagcgtccgtggcaccgacagggaccccagagcccagagaggggcggcgagaggccccaggtcacagcgcggggggactgggccgggctgggctgggggcgccgcaagctggggctcccagctgacggaccgctctccttgcaggtcagtgacttcctgtcgggccgttcgccactgacactggccttgcgtgtgggcgaccacatgatgttcgtgcagctgcagctcgcggcccagcacgctccactgcaacaccgccatgtgctggccgctgcggccgccgccgctgctgcgcggggggaccccagcatagcctcccccgtgtcctcgccctgccggccggtgtccagtgccgcccgagtccccccggtgcccaccagcccgtcccctgcatctccctcgcccatcacagccggctccttccggtcccacgcagcctccaccacctgcccggaggtgagcctggggaagggaagggtgacccttggttggaatccaaagggtgggccgtcctggggaggtcttggggaggacaaggactcttagtcccaggtgagtcccttgtattaagggctatcctgtgacctcgggctggtgggtgatcccccagcctagattggtggggtatttctagatcctgagttgacggtcatcgcctgacatgacctggaccagtagatgatctcttgatctttgactcatgggtcatctctgtgtcctgggttggttgtgacctcgtgaccttgggctagtttatctctaaaccctgtgttgacaggtcatctcctgacctgggctggtgggtgatctctggtccctgggttgctggtgatcccctgatcctggaccccgtgctcatgtgccccttcctcccatcagcagatggactgctcccccacggccagcagcagtgccagtcctggtgccagcaccacgtctaccccaggggccagccctgccccccgctcccgaaaacccggcgccgtcatcgagagctttgtgaatcacgccccgggggtcttctcagggaccttctctggtaggtgtcacagcacatgtgtgagctcacgtgtgtcccgtgaccctgtgcatttggggtctacatccacccacaggcgactccacatattctgggcatacacaggctgtgtccgtctgctcacttcacatgtcccccaggaatcccccacacacacgcctggccctgcccggggggccgcgggtcaccaggcgcctgcatactggggacgtgtcccgctcccgccccgtggtccctcgtgcacatcagcccacatgtccacgccattgcctgagctcatgagctcacacccgtggacgcccgtcctggacatgcgggactgtgcccgtgccgggcactcacggccacctctgcccgcaggcacgctacaccccaactgccaagacagcagcgggcggccgcggcgtgacatcggcaccatcctgcagatcctgaacgacctcctgagcgccacccggcactaccagggcatgcccccttcgctggcccagctccgctgccacgcccagtgctccccggcctcaccggcccccgacctggcccccagaactacctcctgcgagaagctcacggctgccccctcagcctccctgctgcagggccagagccagatccgcatgtgcaagcccccgggtgagtggccaccctcgggggtcctaccttccccgcccgcctgggcttctcaaggcccctctgtgtgagctggtgggctcaggagcagctgacctgcccaggggctgggggggatggcagctgccgtggccactgctctgctccagcccggagagaaggcagcatgtgtgtcagggcacaaagtgtccttgtgtgctcccggggggccacaggcccacttcctcctgccccacccccacccggggcatcatctccagatggcatttggtgcctctgtgaatggccaagtcaggcctggcaggccgaggcggggccagagcccacccctaagcatttcagtgacttggaaaagcagcgaacacaacccccctgccagcctggccccagctactcccaaacggcgggttactccctccagagtctcaccagaagatggctactgtactgcccttgggctctgcacccgtcgcgggggctcctcccagctcagtttaaaagtgggaaactggccgggcgcggtggctcacgcctgtaatcccagcactttgggaggccgacgcgggcggatcacgaggtcaggagatcgagaccatcttggctaacatggtgaaactccgtttccactaaaaatacaaaaaattagccaggcgtggtggtgggcgcctgtagtcccagctactcgggaggctgagacaggagaatggcgtgaacccagaggcggagcttgcagtgagccgagatcgcgccactgcactccagcctgggcgacagagcgagactccgtctcaaaaaaaaaaaaaaaaaaccaaggtacaacccccaagtatctcccctcggatcacagaagcggccaagccccctccatgtaggactccaggaagaatgaggcaggacagtcctgacctccccagctcatggctgagctggagaattagaagccagctgcgtagctgggactccaggcaaacaccaccatgcccagctaattttgtaatttttgtagaggaggggtctcgctctgtggctcaggcctgtctcgaactcctgaggttgcccaggcctgtctcgaactcctgagctcaagcgattctcctgcctcggcctcccaaagtgctgagattacaggcgtgaaccactgtgcccggcatggtggatgtccttgactgtttcctttgctgacctccctccagggagggcaggactgtgtctgacctcaggggcatttgctggggtctggggtggtcctctgtgttcagcaggtggaggctttgggagtcacaggccactacctcctttgcaggggaccggcttcggcagacagaaaaccgcgccacgcgctgcaaggtggaacggctgcagctgcttctgcagcagaaacggctccgtagaaaggcccggcgggacgcgcggggtccgtaccactggtcacccagccgcaaggccggccgcagcgacagcagtagcagcgggggcggcggcagccccagcgaggcctccggcttgggcctcgacttcgaggactccgtgtggaagccagaagtcaaccctgacatcaagtcagagttcgtggtggcttaggatcttcggatcggccaccctcgcccctcgcaccccagcccagggcggcggggactccgagagccccggagagaacgtggcccagccctggagggcaggcggccactcccccagccagaagtctttttttcttttcttcttttttattatttttttctttttttaaaaagttctgaccgtggtttcctggactcttcatgggctttgcttcctacctccttcacccttcactcctgccctcctcttcctcctcctcctcctcctccgtctgtctcctttcacctctgcgccaggtcggtcctccctgccaaccttccccagctccaatatgtagcagtctctctggatggcggagagtgaaggagacggagaaacgcgccccatcccttccgccgcctcctttcccccccgaccctattcaggttttaagtcaaaaatgtcgatatgtcattatgcactttacagatgaggggaggggccgcagtgcgcagaacccaccccaccccccagtgcagacttcggggtctccaccccaggccagcagcgcccactgggctacagcaagccaacaggtcacagaagccaacgaggggactgtttctcttccactcctatcctcttttcttgatcttttttttgcattttccttcatttctttaacaaggagagcaaagctgttttagcagaggctggggctgaggtccccatggggtttgggtgcaggggcatggcaccctttcctgtcgggaagggagaggggaactacccccccagcctgccctccgccccgccccagccggcggactgtgctgtttcctccgcccccactcccgtgttttctgacctcctgcctgagtttggggtatttatagactattaattttctgactgagccaatagtggttggggaactcttgaaaaaggggagagaatggctgggtgctggggagttcccccctccgagccctccttcccggcccaacctgagggatgtggatttgggactgtctgggggcccctcctgcagcgaggatgggagggggtgctgagctgtgaatcccctgggcagggggcgacaactccgtgtagcattaacccccgtggcggggtccgctgctggtctaatttggaccccctgcctctcagtgcccctgccctaggggtgtctgtctccagaggggagggacaaatcccctactggggccatttcaatggggtagtttttggatttttttccccactcactttttattttttaatgataatggagatgtctggacccttcctcaccccacctgtcggtcttgtcctggctctgcctgtcccccaccgttgttctcgtaggtgaaccccaggtcctcaactccccccctttatgtgttgaaagttaatggtttcagatgtgaacatcacgtgttataactgtagcgctgtaaatttttttgtgggagggtgggcagggaggggtcccagagggtagagctcaaggattttgggttttgttttgttttcatttttccaaaaaaaaaagaaaaaaaaatagaaaaaaaaggagtaaaaggggcgggtttgttttttgaagaactgtcttggatacctatttaaatgtgtgttctgttttgttttttaacgatttttaaataacgtctgtgcctccactggttgagggtggaacctccaggcaggaaccggctcgccaccctctgcccggtaagggctgcccaagaaagcattacccgccctcggggggtcgggctgtgggggtcccggcacctggcgtgagtttcatgtatgaaaacataaaattgaaaaaaaaaaaaaaacctacacgagcaccgtgatttcaagtaataaacagaaaatgaaacacacattgactcccgcctgctcgcctagtggggggatctggccttggttgggagggttcctggggtgggatgtcagctcagggagtcagagggactgacctgggtcccaaggccccgaagagggggtggggcaggggtcagggccctgagaatttcccacgctccttccccggctgccgggtgggcaggaagcagccagggtgggagggaggagcccagccacttcctggtacccaaggccggaagtcccttagggtgtggggcgagggcctgcctgcctgcttcgtggcctgggcaggaccctggccccctcaggacctgccagtatgggggagacgcgaccaccagctctccccagccacaggagtcggggactcccactctgccacacccacctgctccccttcctggagtctcacatctgtgtggcttgctgcagggagatcaccaggccgactgggaggacctaggactccgcagggtaccttgggctggcaggtgatacaggcctggcttgacccagccctggggggcctctctggccacacctcctgacattccagcccttcccagacctggccttcagctccaaacctcccggcctttgccccctgtctaggaacacccctggtccggctgtcccttgctgtctgggaacttccccagcctgcgccttccacccctgtccaccccgtcccgcagaccccacccttccctctctctgtccctagcctggagctccccgtgagcctcaccaggactgagtcctctctggggtcccacctccacccatgtccgggctgggcagagatgaggcaataacactatttcatgtctttttttaaattttgtaacctgtatttcctcaggtaacaagagttgcctatgagaagtaattgggctcccattttatagatgggagaacagaggcccaaagaggaacatcacttggcccagaggatttggggtgtttgttcaatgatgtgacctccaccccttatcccatctctaggggccccagtaccgggagcccccaggggaaggggcacaggttcagagagtggcctgggagcaccttcctgagacccctctgcccctcccaacgcccagtcaaccccaaatcatcgcacgcccacggcaggaaggcggatgcccagtcaggcggcacccaccccccgccccgtccctggtgcggatgtcccctcggggctcagggtgggggtgcgggtcaccgacgccaggcctggggtcaaggcgagggccccagggcgccaccgccccctcgctgggcggggtgggaaggaggaaggaggatgttgtctgaagcacctgctgaatcacaggggctgtgtctgtagcctgcagggtggggggcgcgtcccctgcactccaggacccgcccctcgggatgccgacccccaccccagactggggatcccaggggtcaaggctgtgccctgggggcgtggggtggggtatggagctccaggctcagagccctggcctggtagggtcagcccaaccaggggtgcagcgggcggaggggcggcaggcggaggccaagtgtgcgtagggaagcacggagaggtaaactgaggcacaaagagggcagggaccgctgggatctcgcggggcggggtcggccctggatcgctcccttcccccaaccattgaggaaaaagctgaatgggagggggcggcccccggaaacccgccgggatggaaacgcggtttccagggcaacgcgccgcgaaaggagcctgacgtcaccccgggtagggcgccctgcccgcccccgtccgcgcgtcgcgcggcccaggccccgcccaccagcggggaagcctcattggtgatcgcaccgctcgctcatcggcgtgccccagtagcagcgcgacgaagcctccagaaggcgggacttcagcccggcagcgccgagtgcgcaggcgcaagcgcggaggcgctgcagccccgcctctctccccgcgcgtctgcaaagttgggggcgggaggcgcagccgagggtctgacggctgcggcggggcctggacggaagagggggcgagccccggggcgccgcacgtggacccccggcacgggcacgctcacgtgcacccgtcctttcacgccaacgcgtttcctgctgcccccacccctgcaccactgcacgtcccagaccccggcccagcctccccgcggtccctaggctgggggagctcagacaggaggctaggaggagggggactttggggctgaggctttgccaaaggagcaggagtttgccaagtgttgtaggaagcgggaagggtgcgccaggtagggggcacggcgtgtgccaaggcccggaaacgtgaaaccgagtgcttttcgggggcaaccgggaagtcagttggtggagaaaaatcaaagatgggaggaaaggcgaggctgacaaggaccctaaacggtgattccccaagtcggccactggagggatgacttgggggaccagagaggaagagcaggtgagggggagcggcggccaggacatctgggaggtggctagacccgtggcctggactttggggggcggtcgagttggatcgatgatcgatggggaccctggcggcctcaccctgggggaggtagagacgaaaaaggaactacggtgtgcccggaaggtggtggctttaggtccacagggaggtggttggcaaggcgggggtaacagggggaaggagaaaatctgaaatgccggtgtgagctccgggccaagagagttgaggactcaggaggcaggaatcccccgtggccgcccgctgcttggctgtgggctccaacttggtgtgtgctcagagaaggcagtggttggagtgaacagggcctgtgccaggtggggagactagccaaggtgtttgtgcagcctggcctctggagcggcctgggaagagctggagttcgcagggtgggagctgccctgtggctgggagcccgtgctggcgtccctgccaggcggtgatctcacaggtgagcggtgcttggggagacgcggagctgtgggcgggcaggagaaggtcagtggaggtcatggcttttggcttgaggccggagtcctctgggggtggccgaatgcgcccttggagctgccttgggaggtggctagggtggacagcagtggaagccaggcccttggcttagagccactgggttggagggattgagccagtgcccgggcacagccgcccccacagggccttgccccacccgccctcctctcccagcaccatgggaatgggagttaccgggctggaggctggggacgccaccaccccgtggccaagggcgttggggcccaacccaggagcctggtgcagccccacccacgggccgcccagccctggaagggcagagaactggctgcctctggggtcacttgggacaggtgagcagcccagcccagcccagcgggtgggggaggggaggctgtcacctgggccctgcctccaccctctttctggttctcactccctccatttctctttcttttgcctttctctatttctgtcccgatctctggcgctctccccaacccagtaccaccatctccgcccctccgtccctcccctgcttccgccccctctctgggggcccccttcaccccggggcacattccagcttcctcccccgccttgcagtccctccctggagccagctgcctcctcggttgccagagcagagagagtgggcttgggccgaggtcggaggtcgaggagcgggcgggagcctgggagggcacccccaacccctctggaatgtgggtggagcggggcaagggagacagctggtttccacggagggcacatgccccatacccaggacgctacccacactcagccctgggggagagcaagcaaaaccaatgggtgccatcccacgaggggcctgcacagccatcccacacccccgaccagcacgcccgggacagccctccacaggccacgcatttatgggtgcggctggtgtgccaggctcccagatacacaacccccccccccagacacaccccatatacctgtccccaacctcaatccactgtgtgaccctaaaacaaacagaacctccttgctcagcctgggccaaggcctccccaaacaaaactccagcctgcagagtcccaccacacaccgcagctgtcaccagatacaaagagggccctgaccagatacagagagggcagcagccttcccccacaaccaacacacgcctgggcgggggcaggaacacccccagggcctccagccacagacactcacccactcacccctctgtgcaccagtgatcctccgctgcccagccaagcttgactccagcctgctggagtctgggtgggggatggagaggggttcccaggcgagccccaacctatgccttccaaaagtctttctgtgcatgttggaaatacaaatgaaacaggagagttagcatacgggacaattattatttttgtttgtttttgttttgagacggagtctcgctctgtcgccctggctggagtgcattggcgcgatctcggctcaccgcaacctctgcctcccgggttcaagtgattctcctgcctcagcctctggagtagctgggattacaggcgcccgccaccacgcccggctaatttttgtatttttttagtagagacgggctttccccatgttggccaggcaggtctcgaactcctgatctcaagtgatctgcctgtctcggcctcctaaagtgctgggattacaggcgtgagctacagcatccagcccaattttatttatttttagtagagaagggatttcaccatgttggtcaggctggtctcaaactcctgccctcaaatgatccacccgcattggcctcccaaattgctgggattacaggtgtgagccaccacacctggccccagttattagtattttcgagacggggtctcactctctttccaggctggaacgcagtggctccatcacagctcactgcagcctcgctggaactcctgggctcaagcgatcctcctgcctcagcctcctgagtagctgggactacaggtgagcaccaccatgcccagctaattttgctttttttttttttttgtagagacagggtctagctatgttgccccggctggtatcaaactcctggactcaaacgaaagtgctgggattccaggcatgagccagcgctcccggcctgcatacgggatgattccatgtggactgccacatcaaggaagcaaacaacaaggaaagcctggcgctgcgtggagctgtcttttgctgctaactgcccttgaccgacttcctaccaggtcttccctgtgcgcctctaaccccaggaggtgctgctggcatgcccacctctcagatgaagcagtgcggtccagagagcgtcttgggcaccgcctgcctcacagctgggcccctgaccctccagggactgtggctgagcagccatggctgcctggacgggtgtcccctggcccgtctgtccgtctggatgtgggaaccctccaggcacgctggggcgggcaggtgccaggtgcctctccagcaagatgcaacataggtgtcttcacttgcactccgtaggtcctgagcccctgcagctgcctgggagagtggggaaatactctccacttgtcccactccactgttgccatggagatacctcccaccctaggcagggccaccctgagcctggttggctttgcaggaaatccccactctttgacctctctgttaggcacaggacgtgtagtcccatgagagggaactgggcccaggtggagatccatccgcctaccccagagcgcgcatctgttgctaagcaacatctgaggctgcatggaggtgggggctccggagcccccagaccttttcccagtttcagaaactaggtggctgcatccccagcgtccacgcaggcgagcctaagcctcggtcagctttagggtgtccgtgggccatgcagggtcttgggcctttcacagacacctgatctgcacgtcacagacacgcatgggtgcacgtcactacacgtccgccacatgtgcttggctggtctgcgccccagcagaaggggtcacctatgtctctgcagtatcctgtgtactgaaagagcaaacaggtgtgtgaccccagggcaggtcggggtccgtcctgtccccagcctgtctactgcgtgtgcctgtggcaggcagggtctccggatgccgagtgcatggtgtatgactttgtgtccagtgggtacgaagcaggggtgtgggtgtgcacctgtgtgtggcctgtggcggggtgtgtgtgccggggatgtccctctgtggcccaggcctggcctttgggctgctgggatggcctggccggggcaggagtagacagggcctcccagcctccacattcctgagctgtgactcaggcctgtggggagggggtgagtcacagggaagggaagccgacccaccctgcgaacgcatccgaggaacaggagggaaactgaggctggggagcagctcagtccggctttcctgtgtagcagcccctgaatctcaggcccgggggtggggcggggtggcgggggggggcgcgcggggcctcccaggggacctgagatcccagccctggactcagctgggagctgggggaagaggcaggtttaacccttcctcttctgggcttctggaactctgggctgccctgggaggcgcggctcccgctgacacagcacgcgtgcccaccccagggacatgagtcacagcaccaggcatggacacatatgctctgtgggtcccggcacacccgagtcacgcacacccagccctgtccccggctgcccccacatccacatccggataagcgcacactttggagtccaagcgcccacctccttgggttgcacacacagcgccacgcagacgggttcctgtgtctttgcacacacgcgggtgccgggggctctgtgcacacacctccaagactgcgtgcacgcccctatatgccctgcgcaccgacgcaggccggcctggggtccctgcactcaccacgccgtgtgcactcgcacatagctacacattcgtgtccacacaagcttgtgtctctgtactctgcccacgggcacacatgtgcgccacacctggcaacccgcacgcccggtctctgcatcccccaccctggctctgggccccgcgtagtggggccagctgggtcggctgcagcctctgccaggacggtcctatttctgcgcccccgcggggcggccgccaggtgcacggtcccggcccccgcctggctaggaggaggcggtaattatgcggccccggggtcccccccacgcgcctttcatcctcggccacgcccgtcgcaggcctagacgctctctaccgcctcccgcccggtcattagtcggggtcgggggaggacctggcgtccggcgggcggggccccgtggggagggcggagtgggcggtgcgggagcgagggagctccgccctcgtctccatggcgacgccccgcaggggaggaggcccgggaggagtatcagggtgcaggaggtgcgcgccccttccgagacggcaggctggaaagggggcggatttgtgaatgggcccacggggcccaagacagacgcgcggggagcaggttcggggactctgactgatccccgcgcctcgccgggcaggggcgagccccgcgcgtcgggcccggaatagcagtctcgcccccgcccggcgcggctattttgagctcctccgttggggccgaggcgcgggggcggcgggaggctgggggtcgacacgcaggctgcgtcctcgccccgcgagattggacccctcgaggactgtgcgctgtggccgcgcagggctgggcggcggggccccctctcccacgcgaggcgtctgcgtggagcggcggcaccgggagcccggccgctcgagccaaacgccgcggacggagcgaggccgcagcgccccctggtgtccgcaacgggcagcgcgtcccggtcgggtcccgcatggtcagtggccagcaggggtggatgaaggggtcccagccgcctgagacccccggtggggacacaggatcgcggtgagatacctgggagtcacgggtgctcgcagacgcagctgaccccagaggcacaggtaccgacacaggtccacacctggaagccggtgcacagtgctcggcacagatgcaaagcggcaggtgtgcgcaggtgcgtgtcaacgccaccctgggaacccaggatggctgcggacactcacggagcccgcacccaggaacccgctcgtagtaagcgcttaataactaggcactggctgaatgaatgaatgaatgaatgaacacggcgcttcgcaaaaccaggaaaaggcagaggctcacagaaccagggaacgatgggctggggggagcggcaagaattacgcaattatgcaggggccgctgtgactaccaggcaccccctccaactccccccctacaagggctgctctgggtcagagaacgtccaccgcgctgactgctggggctgggggctgggggcgcagatcagaaagaatgggcctgaattgctcccaggctgggcatgtggcgcccgcgtctggggctccagtgggtgggtggcccctcccgcatggacggcgggcgcaggggagctcggtgctgatgtctctctcctttaataaccaccctgcgtgagtggctgacgcagcagccggctgccgctgacggggagtggggcggctgtagtgggggggcccgaggtgcagagggggtggtgatgaatcacacagctgctgcctgggggagggggtcttgagcccatgaggggtcccagagaccttgtcactggagacagcgcccctggctacccccacctcgatccacttgagggtggaagtgagtctgaggtcaggagtggggccgggatttccctgggatgagcagcaaagcgggggtctctgtacgccaacttcccccagcttgtcagcagagggtcatccctccgaagactttctggggcagagaggcaggggtccgcgctggcttcttccaccagggctgggggaggcggcggcatgagatgactcctgggcgaggagcaagtggtggccatagagggccccccagaggctttggggccgccgaagagtagtgagtgagggtccttgtaaagctggttctccagatggcggcggctttaagactcccctccgccaaccaggctcagtaggggaggcctgtggaaggagagaaaaggcctgggtggaggagcagagtgggcctggccccgcgtggggagcgagtgcgccgttgctgtgcagcacggtgggaggggaggccgagggccgggcggagtgctggggtgcagtggggactcggggtgtccgcctgcacccgacagcagggacgcacaacactatccggccaggcgagtgtgggggtgtgggccacgcacccagccgtgataatcgcggttccagtgggagttaggcttgggtgcgggttggagtttgtaggcaaactgggttgcgtaaagttggggtgcaccaaagtgtggcgatgtaggaagaattgggattgcgaatattggggttcgcatgaatggggttgtctctgttggggttttggtgggcatggggttgatggcaggaatggagtgctggggtgctgggaaaactgggacgtcggttgtattggcaagaatatcacgacaggtgtcggggttcagatgaagttgggatgtctgacagccgggtcttggttgggtaggggatctgggctaggttgttatgtcgggactgctggagcacaggcaaagtcggggtcccagtgacacccagaagtccccatgaggcctgaggcctgggaatcggggctagaggcccatttgttccccgccgcaggccagggagcaggcacgcgtaactgggtcagccccgccccgccccgccgcgcgctggtcacgccccctcgagcgcgggtggaggactgcggactgcaaacgtctcggccaatagtcgagcccgacaccagtccgcgggagggggcggaaccgagatagactcggcccccagctcatgaatataagacgcaggcgcgccctctgattggcccaggatgtgtagggggcggggcccggcggaagcgtatataaggccgggctcggggacgcccccccctcactcgcgcgttaggaggctcgggtcgttgtggtgcgctgtcttcccgcttgcgtcagggacctgcccgactcagtggtgagggccctggctgcaccggctccgaggagctcggggcggcgggcggcctgcggcggccaggcgaggcggggccgcagcggcacgcccctgggagggggcgggcccggggtggagtccgccccgccggcggcgagggacagcgggagattgggccgagtagcggccagagggcctctccccgccggtccgggccgccggcgacccggttgccgccgcaaaatggcggccgcgagctcgaggctgtgcccagcgaaatggcgggagcgccgagttcccggatggagtggcgcagggtgcgcgcggggcgcatgcgcacgcggcgggggcggggccacgtggcgcccccggtctccagggccgctttcccggccttggggctggaggtatccacacaccaacgcttttgcttaccgagccttagtttcctccttttcccattgcgattgcatgagggaaaggacggcctcgtaaatcttgggtaggcgtggcccgttctagtgtggttcctcgtctgccacgtcgtgctttgcgcccaaagtttggtccaagttggcacagctcccagtgccagacttccaagtctagttctcagagccactgggtggcggccattcccagccagtgaatgctttgtctgtgtcagcactgaccgcccccttaaatagccagttctcctaaatgccacttcccctgcctggaaatcctgccttatcacttccggggccatcccttcccgattcccggcctaggtcctggctatggaagtcagtacctgccctgaggtgccccccaggacggggcggcctccctgacagccagccccccccccagtctcaggaggcattttacagtgagcagaagcacgttctggtccagcaacaagtagatgtcagttggttagggtaggagttggcacccgttcggaaataggagaacctgagagtgcagtcctgcccagggcacaactggaaggctgtgggggaagggagacacccattgtggaaatgggtgcggcctgccttcagtcttgggggtggatggagtaaattatttgaattaagaagtcctaggtggctgggtgcggtggctcacacctgtaatcccaaaactttgggtggccaaggtgggaggattgcttgagcccaggagtttcagaccagcctgggcaacagagcaagaccccatctctactaaaacaaatttaaaaaaattatccaggcgtggtggtgtacacctacagtcccagtttcttgggaggctgaggtaggaggattgcttgagcccaggaggtggaggctgcagtgacccctgcactccagtctgggtgacagttagacacactgcccccgaccccaaaaaaataagtcctaggtatgagtttgagataatgaaaaataaaaatctgattttctaatatttcccctaaaaaacacatgtcatttacataaaataggaagcggggagaggtggtgagagatgacccctgttgaggatttcattggtgtctgccacaggccgccatggcatcagatgaaggcaaactttttgttggagggctgagttttgacaccaatgagcagtcgctggagcaggtcttctcaaagtacggacagatctctgaaggtgaggctgctgctgggcccgcggccctgggcgggggggcttgtgctcctcctacctggaagtacagctgggtgctgactgcagacctctctcccctgcacagtggtggttgtgaaagacagggagacccagagatctcggggatttgggtttgtcacctttgagaacattgacgacgctaaggatgccatgatggccatgaatgggaaggtgaggatcagggtgctgagcaggagtcccgtctcgaggatggggcacccacctgctaacccgtcccgccctctgtctccagtctgtagatggacggcagatccgagtagaccaggcaggcaagtcgtcagacaaccgatcccgtgggtaccgtggtggctctgccgggggccggggcttcttccgtgggggccgaggacggggccgtgggttctctagaggtgagtgccatgagtgggtcccttggggatgctgtgaggtactgctggtgggagctggtactcactttttcctgtatgtgcaggaggaggggaccgaggctatggggggaaccggttcgagtccaggagtgggggctacggaggctccagagactactatagcaggtgagggggaggccggcccaagcacaggggtggttgcgggatggccagcttccgtcccgggtcccaggtccctgggggagctgagatgagactggctgggcaaggagcagaggcaggtggggacccaggccaagaggagaggagactgctcaggacattcgcagaagcgggagggcctgggggacaggctggtggagattttgaacaatttccaagatgctgccctgctggggtccttgttgtgtccccagaagggacggctggcatgggggctggcggctcagcctgttgtggcagagcagaagtagacgggtaccttccggtactcaacgtttgtctgtcttgcagccggagtcagagtggtggctacagtgaccggagctcgggcgggtcctacagagacagttatgacagttacggtaagtcacactccgagggcgccacgctgctgtggcctgcggtgggagctcggttcaccttggtgccctctccaagcactttaggctggacactcagaccttgtcactgtgcttgcccagaagaggcgcatctgtcctctcagagccatttctatcgcaggacgcaaaagccaaatgagactgaccaaaaaggcaagggagagcgagggcccgctgggcagtcagctaggtgcatgtgtggccgcaggccagcctccctcggctgtggggggtggttgctccccggccgcaggccgcgccctggtctggcctctggggtgaagctgcctcttgttgcttcggtgcctttacactgtgcctgcttcttgtcctcagctacacacaacgagtaaaaacccttcctgctcaagatcgtccttccaatggctgtgtgtttaaagattgtgggagcttcgctgaacgttaatgtgtagtaaatgcacctccttgtattcccactttcgtagtcatttcggttctgatcttgtcaaacccagcctgaccgcttctgacgccgggatggcctcgttactagacttttctttttaaggaagtgctgtttttttttgagggttttcaaaacattttgaaaagcatttacttttttgaccacgagccatgagttttcaaaaaaatcgggggttgtgtgggtttttggtttttgttttagtttttggttgcgttgcctttttttttttagtggggttggccccatgaagtgggtgccccactcacttctctgagatcgaacggactgtgaatccgctctttgtcggaagctgagcaagctgtggcttttttccaactccgtgtgacgtttctgagtgtagtgtggtaggaccccggcgggtgtggcagcaactgccctggagccccagcccctgcgtccatctgtgctgtgcgccccacagtagacgtgcagacgtccctgagaggttcttgaagatgtttatttatattgtccttttttactggaagacgtacgcatactccatcgatgttgtatttgcagtggctgaggaattcttgtacgcagttttctttggctttacgaagccgattaaaagaccgtgtgaaatgaaccttgctctgacaattcccttgcattgcaccacacactccttgctgcgggctcctgcagccagacctgagcagagagagaaggtggagaagcagcgggtctgcaagccttccctggggcctgcagagctagaaagggaggcccagcagactggcgctggtcagggtaggggagccaggcgggggacgggagcgggcagctcaggcctcagggcagccctgggaggcttctggcagtggtggccagagggctggactgtgcgggcagcttagcagggacagtggacgtgcacctgacgctgacctggactgcctcagtctagaagcaggccagagagcagaggcacgtggcatcccagggcgacctcagacggccagccggttagctagttctgctgttgcttcacgagttctgagcattctctgctagcctatggaagctgcagccctcggaggacagaagtgttgtgcgcccaacagaaccctctgagacgcaagctgctcccttggctagctcatatgtggaaatagccctgtaattcgaggtaactccttccgctcgtgtccacatccctcttgttgagagctcactgaaagtcatgtgcccggggaatgttcctgtgactgttttttgtttttccttttttttttaactttgtttttgtttttttcaattaagctggaactaaagtcaggcccagccattacgctccccacgtgcagccaggtgcagcctgggcccagtcatgcctggctcatagatgaaatcccttaagcaggattgaagaccagtgaacgcccccgccttttggattttttgctcaattgaccgtcttttccagacctctttaagtcacactcttaacttagctttctctgatgtctgttgccgccattagtttttttctagagcccacactggcccacatagctccatcccatacgggtagctggctccagctgcgccaaggtgcagacccgccctgggcatgctggcctgtgacggagcctgaggtcacagccccctgactagcctgagaccttcctaggggctgtggctgtttccggggaggccgggaggggcagctgtgagccctgtggaggacgttgggagtaacgctgctttgctttggcaggttgaaggggcccggccaggactcggggaagggtggcctgagagcagcgatgacctctggggtcactgtcccaggagggacttcacctggaacaagagctggaggcagccgcttgcccaggaggcttgtcccctgtaagtgctttcgggaagagtggcatgtggcgctgagccctgtcccgggcggcacctgggcgtttcagtgagtcctgctctcccgcacctatggccccatggcgggcgcctttcggtgtgtgttgggtgcagggcagcgcctcccgggagcgccgggtcccccgcctggagcccgcgcctgttctccctcccttcctcctccttccaggaggcgcttcgccagtgaggtgcgggctcagggcctcgagtctctcctggagcacgggctgcggtgcgccggcagcttacggggcggccagtccttgcccacaacgatgtggagccctgtgaaagtcggattcgaataaagggccacgtgtgcacccagaaagccgagtctgtggttcaggggggtctgtcggcggagcggggccactggaagaaaagcctgcggacctcggttcagcgcacgagtaggacccgacagggaagactgcaagggtcattgtccgagcagtgaccgcggggggctcgccactgagggggttcgcagcgcggagactccagtctcgcgggatctgaggcgcactcggcttcgagggagcggcggccgcgcagccgctgtcaggccccgtcttgggccgagtcccgggttccctgtagcaggcttgggagcggggcgccaccttcctgggccctggacgtggccgacgcgttctcagtgtccgtgaggccggggcaggagtggcgggggtcgccccgaagtgggtgggaatgagcggcccgaggtcctgaagtcggggtccgccccgtctccccgctgccagcccgatttcctcggaagccgcgaccccccacgctgggctggcagttctgggctctgccggctgcgccttgccgggactcccacgggcgggctccgggcctccgtcctgatcccttggagcggttcgacgaagcaagttccgcggcgggcgcgcggggcactgtgggtagcgccggggctcaccaggcggaggcggggcccggcgtcaagctccgcctccgcgccccattggctggcatcacctccgcgcgcctgactgacagcgcgcataggggcggggcgccgccaccgcttccgccgggccatggggccgcgcgtgctgcagccgccgctgctgctgctcctgctggcgctgctgctggcggcgctgccgtgcggtgccgaagaggcctcgccgctgcgccccgcgcaggtcacgttgtcgccgccgccggccgtgacgaacgggagccagccgggcgcgccacacaacagcacgcacacgcgtccgccgggggcgtcgggctcggcgctgacgcgctccttctacgtgatcctgggcttctgcggcctgaccgcgctctacttcctgatccgggcgtttaggtgcgtcaggcgcacgtgggcgccgtctctcagccttggccaattagcgcgcgcctagtgcgtcacgtgccgggccgcggggtcctcccctccctccctccctccctccctctctccctgttggagtgggcgtgggcggtgctgtgcggggtcgtcacgtggtgtgggcggtgcaggggccacgggactcacccgctctccagcctgcgcctggggttggaggtgcccagcgcgccgcctcttaactcgggggtgacgctgcccgtttcccaggtggggccactgaagccggagcatgccgggcaggggtcaggccctggcggggcgagggggcctccttggctccttgtcgccggatgcccgtcctcgttctcatcttcccgcctgccgccaggcctttccgtggggtcccgatattttcctttctgcttctacccactgaagctggttcgtcgccagggtcggccacgtgcccgccttgggtgctcccacagcccgggaggtgcagctgcgtccccagaccctcgcgggggtctccagctgtaggcagcccctgggcaggaggggcttctgcgtgttcaggccaccccggcttccctggcctgtggctccagtctcctctgggctcctgactacccagtgtggctgcttctcccgggtgggagagacacagcgaggaccttatccctccccatcaccaccctggcaaagtcaagccgctttttattttttataagtttttattgtagcgatggggtctcgccatgttacccgcgctggtctgaactcctgggctcaagtgatcctttttcgttggcctcccaaagtgctggcattatagatgtgagcacctgcactccgccatgctgctttttatgggccctgtgcagagcctcccctgtgctccacacctcttcctgtggaagcacctgctgcgcgctctcccctgcctgtatgccgcgccctccctgcctcccgggctgctggggccaccaggggcttggccctgagacaggcttccattctgttgtctttggcaaagtctcacccctgtgtgagcctcagtcttttcatcagtgcaatgggagtgacatcagcgtgcctctcctggggtcctggcgcaggggagatgggagggcctggtagggcacatgtcttcttactgtcatcgccatgggagtgaatggtaatcacttggcgattaggacatgaaagaagcaggcacagcaaaaccagggaggtctgcagcagggctcggggctccagtagaggacggcaatgagagtcctgagggaaggaggaggcagggttggcggggaggggccactgactatgcctggacctacttccaggttgaagaagcctcagcggaggcgatacggcctcctcgccaacactgaggaccccacggagatggcctcgctggacagcgacgaggagacggtgtttgagtcccggaatctgagatggtgtgcacccttccccagctctggggcctcggtgggcaggctgggctggagactcagcaggaccctggggacttggccaagccatggagtggtccctgcaatcacagctgacagcggtagtcaggccatggccccactgggcagggctcatcccttctcccagcctccatttacaactttttttttttaaacttaaatgtttgtcatttatttatttttgaggtggagtggcgcgatcccaactcactgcaacctccgcctccgggattgaggcgattttcctgccacagcctcccgagtagctgggattacaggcacccgccaccacgcctcgctaattttttgtatttagtagatagagatggggtttcaccatgttggccaggctgggttccagctccttacctcaggtgatccatctgcctgggcttcccaaagagctgggattacaggtgtgagccaccgcacctgacctaagttttgttttgttttgagatggagtttcgctcttgttgcccaggctggagtgcaatggcacgatctctgctcactgcaacctccacctcccaggttcaagcatttctcccatcgcagcctcctgagtagctgggattaaaggtgctcaccactacacccggctaatttttgtagttttagtagagacagggtttcaccatgttggccaggctggcctcgaactcctgacctcaggtgatctgcccgcttcggcctcccaaagtgctgggattacaggtgtgagccaccgtggtcagccttcttgcttttttaaggcaggaaagcggctgcagggcttagggtagtggttgctccatctgggcccctccctgagggatgaggtctaagtcaggtggagaactgactgcaggatgcttctgagcgggcggggtcagggagggcctctccctggtgtaatggggctggcttctggaagagtgtctcaggccgagggaacagcagggagcggccgggctgcgcagatgccgggcgggactggggtaggcctgggcatcgaggcagctgtcaggggttagcagggttctgggcagggaatgatgggtatgttgcgctgcagtgtggctgctggggggaccttggcctgttggggggtggcaggcatggaggctgggagaccaggagactgggcggcctctggggacagctctgactttttgagcccccagggagggaggcactgggatccctccgcatgctctgactccattctgggaacccctcccaggtttcttctacctcctggctgggggccccttcccccggagtgggcagttgcacagggcccaggaggccggggagggaggccagtggggggaggctgggccctggtagaccgaggggcctggacaggctgcctgcccctgcctgacctgggtgagcctctgcccggcagggcgggcccttcactccttccctctcacccttgaccccctgctttcagatgctgagccagggaggcggcccttccagcagccatgagggaaggacaggagatggggcccaccccagtgcccagcaaccccctgctccaccgctcattcccctgctggccccggggctggtctcacccagtgccaacccgagagctccttttggaacctgcacagcccgccgacctgttgccacctgcacccaccgctggaccatgcagcctcgcctcctggatgctgtcccagcctggccgagggtcccaggtgaagactggagggaccccaacagccaccgcccaggacgctgaggctcccttgcctgactgtgacttgtgcctctctcctgcccccgtggggacatggcagcccagagccaaggctgggtgggcaggtgacccaaggaacctttctgggaacaccttctcgccgggctgggaacaataaatgcagccatgtctctgcagctggtgctgaccccatgccacctctagacccgtgcgtactggtgcagccagtgtgggggtgggtggcggagcagggctcaagccagcctcggttccccatctgcgaccatgcttgggttctccagccttgctcccaagtaaggaacccatcttcagctgcctgggatgaggccctgcctgtcagcatctctcttcctagagagaactcctattcatccgtcaaagcccctgccccagggccccctctatgccatcccttcagcctgggtctcatgggccctgccctggaggatccccacatcaccctcatgaatacctctggcaatgattccagggagccccagagctctgctgcaggaggctggagttccgtgcggcctgggtccccatgccggacactcctcccccatctgcctcctgtgggacttggagcctgagaccccatcccaggcaaggtgcttaatcagcttccctggggccttgttcttcctgcaggggcctgtgtctgggcggagtccagccctggcctgtcatcctgtcccccatgaggttagccttggagagaccatggtgcgtgggtacccatggcctgaggtcccccacaggcaacctgtctggagctgccactgccctgtcacgaggaggagctgccaccaggtggcagccttgagccgcccagtcctctggctgtctccttggtcctaacccttcatgtgggaaagcaagtccagcacagcccatttgtcactccacttcctgaacccaccgtgtcctcacatccactgggggatgggcagtcccccaggtttgcatctcacatacctgccgaccctccctgtctgccgccagggttgggaggggctgtctccactgggggccaggctatcgccccttcagaccagggtcccctgtcctggtactatctgttcccttgggcatgtccgtctgaccaggcctgccaagactctgcttacgtttctccttccccttccagtgccctgggtccttctctgccccagcctcagctgccgcctccaggaagtcctccctgattgcccaccccagcctgttctttaggggaatcctgcagggaaggttggggaagcaacccttaaagtgagggcagagcccgagggaggcccctgagactgcaggtggggagggcagcttggctcagcctggctgtgtgtgggactggggacaagcaagtcacacctatgactcgggctctgctgttccccatctgtctggccgttgcgtctgtctccaaactcccgtttgcatctctccatctgcctccttcactttgtctctgtccgtctctgtctccatgtctgaccctttgggacacacttttaacaggcacggagacaccagccccggcccccaaccctgtgatctgtgccccccgtcccacagctctgagcgctttcaccagcttcaaaaggcacattaattactctaatgaggtcaggagagacccacgctctgccatccggagtcggaacatgccgcagcccccagcccagccgccgccgccccccgctcgagcagggagaggggctctgctgcctccgtcccctctgcctgtcggggcccgtgctgcaccccacgttgctgcagagtaattggcagccccccaaggttaatgcactgttagccaggggttctcctgggctcagagccggagaggggcctgtcagcgagaaatgaaaggccccaggtcccggctggtgctcggcttgtgagcgtgtgtgtgcccgtgggagtgcgtgtgtgtgcgggtgcctgggagcttgcgggggcgggcagtggcttcctccacctctcccacgcagacacgcagacacgcaggcacccacaaaatacagtctcatagacacacggtaagcaactcggacagttccatggatgggacgcccgcagccccgtgggacacgcgatcacacacatgggtgtgacctgctcagctcctaaccccacgccggggagtgtctcagacccatgccccccacccttgcccctcggtgtgcccactggacaagcagcatatcaggtctgtgcctctgggtgggggggggtgggggtctctgcttcagcagcgggccccgcccaggctggagtccagtggactcactgcggggcttctccgcttgtgaaataggggcgggtgggcgctggggacgtggcctcaaaggcgggatgcgttgggttccttgcggcgccggcttgtgcccacagcttggggccgacattcatcctggggagatagagacagggctcctctgccgccctggtgccggggtgccccagggatgtggccccatgtgccaaatcacagtcactcgggttggcaggcgacggagggctctctgcctcttctgggggtgctgagacccctgtaccctcgactccccacctccagggatctcacccccaggtgcccatctcctctgtggggggcctgagccaccactgaccccacattaaggccactgacgtccccgtcctaggccagccagcccctgagaagcacccagtgctttgctgtgggacacaaagccacacatggctattcacgttatttcattaagttacataaaactggaggtccagggcctcagtcaccatggggagaggtcctcagtcgccatggggagaggtccgggtcctcagtcgccgtggggagaggtctggggcctcagtcactgtggtggacagcgattggtgggggcagggacatttcctttgtcttggaaagttctggacgctggtggtgtctggacactggagaacgggtctgtgttcaggccccagacctgaaggtgggatgagggagagaggaaggaggaggaaggggaggagggaggggacagagtgggaaggagaaggatgtgaatggagaggaaggatgggaggaggaaggaaggaaggagggaaggggaggaggaggaaggagaggagggtgcagaggatgggggaaggaggggggaggagggtgtgaaggggaaggagggaggagggagcggaggactgagaaggggaggaaggtgtaaaaggagagggagagaggaaggaagggagggggtattaagggggaagagagtgggaagggggaggagggaggggagggtagtatgaagggggaaggaaggagggaggggagaagggtgggaaggggaggaaggagagagggagggaggggaaggtgtgaagggaaggagggaggggaggtgggagggaagtagggagggggagggaggggaaaggtgtgaagggaaggagggaggggaggagggagggaggagggtgtgaagggaggagggggaggagggtgggaggggaggagggagggaggagggtgtgaaggtgtgaagggaggagggagggaggggaggagggagggaggagggtgtgaagggaggagggagggaggagggtgtgaagggaggagggagggaggggaggagggagggaggagagtgtgaagagaggagaatgggaaggatgggagctggggaggagggaggagggtgagctgggaatggggctgtgtgcctgctcttttccaccactggctgcaggggttgcaggaatcttgggtccatggctggatgggggtggggattttcatgttacccactggagaaagggatacatttttattttcaaggacagcgacccagcccaggggaaacgcccctggcccctggggctaagcgcagaccccagctccgtgcttcgcaggtggggggcgatggacagcggtggggctcccgccctgagtggagcctgtgacctgcccgggccccagcgccccgtgacccctgccgcctgatccttgcctggctgagatggggcttctgaaggctgccggcaccagggcaggcagcgcattgggtccaatttattctgtaatgagaaattctccccgcatatttttagcttcctcctggcgtcgcggcctttgaaggctgaggggctgcgggacgctgatcccaagccctgtggcctggccatgtgggcagtgggtgctgggcacgggctggacaagtcccttcctgagtctgggtagaccccagtcccagcagtgcagagcagggggcggggccagaccccatcaagccctgtactggctccagaccagggactgagggcgaccctggataacccctgaccttggcggacacctgttcccagagtgagcctgatttctgacccttggctccacaggaagcttactctagagtgacctccggccgcggctgcgtcccaaagccgggacagctcccagccccaggagggaacagggcttcttggacccccacagtggcccccctgccaggcaggggtttgccggggcagcctcgcccagggccaggcctcggagacgccctgccctcccctcccttccccaggtccttcctctaggagcggccagcgggcgcggggaggttgaatgggggacgcaccgcctttgttcccgtccctgcttgggctctgaccttgagagagacaagaacagaaggaaaacggagcttctgctcaaatccgttcagcggtggcggtggtggcggctctcgcctcggtggcccctgcatgcaaatgagtggccctgccatgcctgggtggaggtggtgcccttccagctcccacctgtgcaggtcccagtcctggtttgagaagagaccccctcctcccgaccctggcccacccctcctcacccacgagatcccttgaagcaggagggggcttctggtcccagggtagaaggaagcttccagaactcccacctttgccaggtggcatgctggggccgggcacgccaagaccccaggctcacggccccttgtcctgtgcttgggtgcagccgccacactctgctccgaaagtgctcacctccgggagtggccgtccccctccctaaaagagccccccaccagacggagccgcccgggaagcttctccagcctgtctgggctacagagccttgtgtggctagaacccaaggccctcactccaggggtgctgagagagcctgtccagagggcctgcctcagccaccacctgggacaggttcacgccctccactgaagagacacccggccagccctgggccttcgacctgggacgtctgtagtggggtcaggggatgagacctggagctcagaacagacgggctgagctccctggaggagagagaactgagaaccttgtcctggcagggacgctagagcactgggtgggacagacctttctggaagagcaagattttaacaggaagaaaaagtggaaggacttcccagcaggacccagcctgaacaaaggtcaggtggtgtggcccgcgtggcccgctggggaatcgggggaggagggcacgcaggagacacaggacagagcccaccacgtctcagagctgtgggacggtggtgggtccggtccccaccccaccttgctggggcacaggttagcttgcccatctctgggttcacggtccctgccaggagtttgggtaatgcctcacacagggaccttcgggtccaagggctgttggtgcttgccctgcagttccctctcctgcactgggcctggtgaatgacactaattcagagacgtacaacacgatctgggcatcgccagcaaagtccagccagcgtttgatgacagcctaccctccacaagctcagagtctggtgagggaggctgtggcatgaataagggcaaaaacagagggcaggccaggtgcagtggctcacgcctgtaatcctagcactttgggaagcccaggtgggaagatcgcctgagcccaggagttcaagaccagcgtggccaacatggccagacactgtctctatagattggaaaaaagacaaagcagaggccaggcccccagttccccacctgtgtcagcctaccaggaggagaaatcactcggcgttccctgaacagatcagaccccgggtctttgcacaagctgtgcccccgggcagcggccctcccctgcctgcaggattcgtgcgtggagactgatttgctgtcggccggggcttcactctgggcttcttggatcccatccccagctgctcacactccacatcggtccacctactatgctcccggcacccttagggctgaggtgtagggacttactccatccccagggaacagcgtgggtccggagaggcgactcccaggagggccccagggaggtcgcagcccgagcagctttggactttggccagcgcccctctgaaactctgccccggcccccgcagggagactggagttggccgagcccgatttgggacgcgtgcgtcggggttggtgaggctgcggatagcgctggaaccgggcaggtgagaggcccgggacccagggccgggccgggtggagcgcgtgggggcgcgggaggcagggtgcgcccccgcccctcggagaccccaggccgggccacgcggatgccggcggggggcgcgcagaatcggggtcgctgggggcaggccccgggggacgagcctgagacggggtgggccggggcagggggcgggcgcaggctggagacccccgcccagtccccgcgcggccggggcacggcgggagggggcgcccgcggccctcccgacgctcgggcgggacaaaggccggagcccgggcccctccccggcgggtgcggcggcggcggcccgcgctccgacagtccgcgcggccgggtcctgcgcccggggcgaccccggcgccccgccccgccgccgcctgacttctcggcgcccgaggtcgcgcgcgcggaggcgggggcggcccgggatctccaagcgccgccgcgccctcctcccgcccgccctccgcccgcccgctcggcggcggcggcggcggcggaggaggcggagaaggctggcaggcggcggccgggagagcgagcgcggcggccggaccggggccatggcgcccgcgcagcgcccgctgctcccgctgctgctcctgctgttaccgctgccgccgccgcccttcgcgcgcgccgaggacgccgcccgcgccaactcggaccgctacgccgtctactggaaccgcagcaaccccaggtgagcgcggccgcgcgcggggggcgcccggggaccccccaacgccccccaagccgcgcccggcctcgcgcccccggagctccgggcgccccccacgcgcgcgccgccgccgggatgcgggcgcccggttcccgcgggagccccccagggagctccggccccccggagtttgggggactcgcccttttcgcgcctgccttccccggggcgccccattgccctacggactgtggggactcgcgccccacatcccccagagcgccgacgtctcctggagtttggggaacccctctggtaccctccgatgccgggtagcccctgagttgcctgcctggacttggggggacccctgatccacccgcttctctggggagccccctcggtttcgcatttggtggggatccccggggaccttggcaccggaggtgggggactgtggccctcgagggatctctgggttcgtcctgcccgcaggtccccagatgaacttggggaagttggagtgtccctccctcaggacccagcatctgcttcactccagggggccaagggcccagctttgaaaggagactgaggggccggggagctgggggtcagccccgggaggggcagtgggatggagtcctctcttgtcctctgggcgctgaccaggaaactgaggtgcagaggggatgaggagctggctcaaggtcatgcaagggggggacttgggggcaggacccaggtggcccagtgccctgcctgccacgcccggccgagatgccgcacccgcctgctgcaggcccccttgttttgaaccaggtccgggccaggcacaacgtgggggacaggagaagcccccgttggtcagagcaaaaaaagtttgccggggcctggccatggcctggacgtgggtagaaccctctgaaccatcccagggtctccaagacaggagcaggctgcagcttccctgggggtcccgtgggagccggggctttgggggtcctggggctcgggagggagtcagccccagcactcagggtgtcaccgtcttcctaaggcacacggagctgcacatcgggggctgaggcggcccccccccactcttctgctactggtcactttctctccgttttccagccgcttcctgtgccgaccgagccgccctctggagcccgccacccctccttgtcccctctgtctcctgctgtcctcggtccccgggaggaaagttgcatgaaggggtctctttgaggcgggctcggggacaagggcggcccgtgttccgccgtgggggtggggaacacgcacaggcccaccccccaccctggtcaacggcctcgggtcgggccctgggggctgagggcagggaccccgggccgctgggggacggctggcccacctcagagcgggtccccgagccgcccgctgtgctggtcacatgtgggtttgattaaggctgtcgctggccgtgcggggagtccagcgggcagcgcttccccggcccaagtttttggtttcagctgcggaatctcccgtccccagcgtggcctgtcctttgttctagcaaacgccaaacacacgaggacccggcaaccgggggaggaaggtggtcaccagggccgtcctgctgccccacctgccacagggctgtgggctgcgggccggacccccggccaggggaaggaagtggcctccccagtgcctggcttggcccagccacctcctgttgctccgggtctgacctggttgcccagctcaaaccgctgcctgagggaacggccttgctggtccgcagagccgacctgggcagcaccgaggctgcctcctccttcctctcctgcctgcggtatccagggttgctggggacggagccgacaccctgcagtggggcccagggctgggtgagcaccttcccgggaagccgggatccagccagaatcagggctttgtcgcggacatcaggggtctctgcagttctcagatttggtgtccaggggcacctgcccgggacctgtgcctgagtggcgggggtgtcaggcacagcagggggtggtgctgggcctccgtatccaaggggaccctgtggaggggacatcggcttggggagaggagtggcgtcagccggcaggcctaaggtgtgaggctgggctggccggggagggatgatggggtcgggcaggtgtgtgggggatgcggggaccccaagtctttgagaggggcatacagaaaggcactggagacggggacagccgcgatggggggcagacagcagcgtgggcaccaggggaccgtgtgctcgatggggcctgcaggcccgggcagtgccgcagcgtcgccggccgccccttccgcccattggcctggcacctgtgcccaggcgatgactgtgtggtctgtctccacatcacaccctctctgctgtgagaggcgatgcctgcacccaggggaccccgcacccacctccttgggccgctataaggtggggccccgttgggtggtctggctggccggccccgccactcccaccggtgactgcacagcgtccgtccaacccactccccaacctgggctgggtacccctgagctggccgccaggagtctctgggcctgttcccagccgacccgcatcgggctggggcgtccagggcttggacctggccggctgccctcacctgtcctgttggacctggccggctgccctcacctgtcctggccacaacaccgcgtgtgcattcccacggctgctcatgtgtgtttgcgtgcagcggtggggaagggtggcgtgcaggtgtgcctggagtcgcatccggctgcaggttacatgtgtctgtgtgtggcaggaggctgcgtgaatccacagggcacagctctggcgtgtttgcacatgtgtctgcgtgattgcatatgaggtgcatgtgtgtgcatgagtgtgtctgtgcgtggcacccgcgtttgcatgtgcgtgcccttgcacgggatgtctgcagtgtccgaggtccctgtgcgtgtctgcctgtggcatgcatgcgttttgtctgtgcgtggagtgcaggtgtgtgtgcgtgtctgcgtgtggggtgcatgtaagtgtgtctccctgggggcagtgctggctggctgagggcctgcaatgtgggggcagtggtggccccagcacggtccacaatggcaaccccgctgttggccctccctctcctcctcccctggggacgggaccagggcccgtgtgcagacggccatcaagcctcagagcagggtggacgcaggggcctgtggtccccgggagtccccaccttctgattggaaatctgcagccttgggggcactgggtgggcgcttgcccacactgggcatctctgggcttcggccaccctcccggggttccccacggacccagtggccctcgggtgtgggcagcagccgggttcccctcaaacactggatggaaaatggtgacctatgcaagggctcactccccgagggaggagccgtcccccagcagagggcagaggtgaacggggtgtctcgctccccgtggctccgctggcgtccctcggcctctcggggagccggctttgaagggggtgatgccgtgttctgctgcataagggttttttgttttgtttgagagaagctggtccactcggcattgggggcgctaggagagccgggcggtgggcctgggggattcggggcctgagggtggggtcctggaggccgtggggtacctggactcagactcgggagtctgggagacctgggcatgacgtcaggcaggtggcttagcagcctggaacccccaggcctgctctgcgaagtgggggtgacggagccctgcggtgggtgcggctcggccgatagggcctggtgtggatgggcaaaggcctgagggtggtcccaggggttagtgtcccctccccagaagggaaaccgaggcagctcctgtggtggggaggatgcttctgccgaggcaccatggtctctgtgtctcacggtctctttgggtctctgtcttccccatctctgggcatcctggggtgccatgggtggcccaggccttccgcctccactgcaggcctccctgggcggcctcagtttgcagagaagggaacagaggttccgtggcggggggccgtgaacgcagtgggatttgaccttcccccgtctctgggctgacgtctccgcaggtctgcaggggactggccctacgtgggtccctcggggtcacggcggaggcagtgggttgtgcattcatgggggtccgggtggtagcgtttctgtggagccggtggtctccttgtcatccatgagggtcctgccccggtggccgtgtgttccccgggacacggcttctctcctccccaggaaccgggatgcagccaggccttgcccctcagtcctgtgtgtgggaccagcctctcctgcagatgggtcctcagggagagctgggctttgtaccttgctgggggaagggctgagctgctcccgtccctgtgcccaccgtcccgtcgccccagacacgcggctggagcctgcggaggagcagacgagccggcggggtttttgctttaacctcaagcaggcgtttgaactctgtggccgagtcggtcctggtggggggctcgtgccacacctgctcccagaccaggctggtgtggggtctggccgagagactcagcggcgtgtccccccagctctgtgcgccccttgtccacctgccctgtgggtcaggggcccccaattcagggacagagcagccgaggccctgaaagacggtgactcacccaaggccacccggaagttgggcagagtccagggtgtcccacctggggccggcccgggggaagccagggacagccctgggaggggcaggaaggtgggtggccgacggcagctgcactctgtaccagggccacccacgcccacggtgacggaagcccaggtggggctgaccctgcccggcccatctttttcctattttgcttcatttctagggccctgcctcagtttaccctcctgcaccacaaggccatacttgtcctttcttgggcagaccttgcaccatcccggggactgatttcccttcaggtcccacccaggtcctgagcaggaggaaaagctccagtcctcagtcaggggggacatctcttccgtccctggaaaagccaggtgtgggtgctgtcaccccagcaggtcttgctgggggtggcaggaggggacgggcggcctcagccccacgctgggcttcaggacccgggctgcctgctcatccggccagcctgggcctccccgggagcttctccaccctggaagagagatgcagacgggtgcaggcgtccacctgcccacccacggggtcctggctgccggccacaccactgcctcagtttccagtcctggaaggcagcccagcccacccccaccccagttttgggtgagattcctaattagtcgcttagctattagcgtctaataacttgacaattgcccgattggagctaattagctccaggccgcttgctggaagctggtgacagccaggaggcccgggtgggcaggaggggagccctgctgggtgagcctctgcctggggcctggagggctgcctggaggcgtggactttggcacccgcaggttgagtgagtgtggggggaaggtgtggcccggcagagggaacccggaggagtaaaaactgccaccgctgctctgtctgggaaaaatcccaaatcagtcattaaccccttagtgagaatttcagtctctctgccgctccggggaggatttgcatatcgaggcttcatcactaatggaggaagcgaaggctttgtctgcctctccccaggtgcggttttggggtgggggccccctcccccctgcaggcgccaccctcaacaggggcaacgcgcccacctcgggcttgcccgccaacttggaaccgggaatgccaacacagcaaggccgctgctattttagagacgcaaagggaaaaatacggccccactccggcaggcagagccgggggtgggggttcccctgggacctgccctccaacacacacacctgtgggctgctccccacaactctggcattgcaaagtcctcgcctcttgacctttttaattcactcattattgagcaccactgtatgcagggcctgtgtagggccctggggaggggacagaggaggccaacatcaggatccgggattcagacagcaaaccctgtaaagagcagatgtgatatggggcggggcacagggaacagcactgcaggcagtgggaacagcagctgcagaggcccttggtgggaacagggacagccgggaggctggtgtggctggaagggaggagtcttggagagaggaggatgaggagggcgcagtggatgggccacacaggcctggaggggtgtggattttattctgaggatcaggaatggatggagggctctgagccgccgccaacgtgttacagggtctgttttgcagaagagcgaggcttgggatatggggaggctgggccccggcagaccctcaccgcagcctggaggggcccgggcacctggccgctcagccacacagaagcctcggtctctgacattttaccgaaggcagaacaggaggagagaacacagtggtgtcagacgtgggggaaggaggcaccattggggaaccaagaggccagagggggacctacagggctggtgctgtgggcactttcagaggctgctctgtctcaagaagtgtcctgctaggagccaggttctttttttgggttgaatgtggctccctggggatcactgccgggacaggaggggaaactgaggccagagggcagtggggagcccagacgcccctgtggtccctccacggaggcctcccctgcagggtgacctgggtgtgggcagtcccaggcgggagctgggccttggctaccatcgaccgcctgatcaatgggctttcacttgggctgggcaggaacgaaaatgacttttcaaaaaggctggagcagcttctgcatcgatcgtgcccaaggggccagcgggtcaatgagatgcctgtgcccggccggccaatggggcagcctgaggggtgggctgaggccgagcccatctccatctgagcctgtatgggggctgcccccgtgtctgtgcggacgcaccccgagtgtccaacagccgggaggaccatccccttgcacggaggggaaagggagcctctgagaggaggccggacctcgagacccaagggttcaaatccagacgcaagcccagaactgcaagattccgaagccccggaagggcccctgccctccaggcctggtgcccgggggagatttccctgcaacacgccctcccatgtcccctgtgctgggctcacaggggtgatgaaggaggcctgggaagctctctgtccctggacgaatccaaccaggtagggaagggctggagggtgacttcaccgcctccgccgccctgccttgaaattctttgctctggagatcttcatgccggatccctagtggggaaactgaggcgcaagtgagcacacctgtctgccccttctcacccctggagacccaggaacccccggccccgcctggcgtggcatctcagggtggcggggggccgggctgatgccatctgataatcccaccaccctctctctcgagctgctgtgccaattagtgcccccagtgtggggcctgcggcgggctcacccctgcaggccggggtggcggtggctgtgccgggctagaggcagtgccagggccgggatcgtagcagcctgcacccatgtgctgccaacactggtggggcctcagtttcccctgcctgtgcatggagggaggaggcaggagcggtgtgggggaccccccattcctccctgttcaggtcttttatgtgctaataagcccctctcagggcccccctcgtgccccgcttggtccaggccgccggttacatgacaggggccctggggaccacagccgggagatctaagggctcctgccgccatcgcccgaggcagtgagggaaggggagccgccggtcccttcctcggctgatctctatcctcacagacgaggctgggtcagggggctccctggaggaaggggcctgtgggttgcgtctgggggacctcagggcaaaggcctggaggcagggctgggggctgaggtgtcaggagtgcaggcacccaagagggagaccaggaggccgccggattccggggctcggggctcgggaggtttctgggttccagatgtgagagggtggtatggggctcgcagggtcacacaggaaggcaggggtggggctgggagtggagcccaggatgtctccgagctgggcggcaggtggaactcggcaggctgagagagagggggcggtgggcggaactctgggggtgctgagaggagggtggagggattcttcacgccaagctccgttctctttggggaaactgaggccagggtgggggcagagcttgccccagagcgagctggaatgcccgacctgtgtcccccacgctgccccggtccttctcaacaggtgggagtgcagaatgaaagcagggctgggggctgcctggaggaggcggcacagatgttaagcatgttaggtagatgcgaagtttctggagagggaattcttgtggagggacagctcgtgcagaggcccggagtcaggaaccccccgccggccctttgcacacaggggtccagatgtcacccacctggacacccacctcgctgctggccctgccgtggggctgttggggacactgaggcaggaggtggggggcagtgccaggcaagagatcgtgggctcccaaccttggaagcccgccgtgattggggtgtgcaaccccacctgctgaccgctatcaccattcagggcccaggcggagtccaccttgtgaactgacccctcccccattccccggcctgacttccccgtgcacctgtcccctgacccgtccctccccgctcaccctgtcccgtgccctgtgcacctgtccccggagccatctctccccgcgcacactgacccgtgccccatgcacctgtcccctgaccctgtcccccctggcgcaccctgacccgtcccccgtgctcctgaccccggccctcgccgcgcaccccgacccgtccctcgtgctcctgtcccctgaccctggccctccccgcgcaccccgacccgtgccccgttcctcgctccgggcgctgacctctggccgccttgtccccgcaggttccacgcaggcgcgggggacgacggcgggggctacacggtggaggtgagcatcaatgactacctggacatctactgcccgcactatggggcgccgctgccgccggccgagcgcatggagcactacgtgctgtacatggtcaacggcgagggccacgcctcctgcgaccaccgccagcgcggcttcaagcgctgggagtgcaaccggcccgcggcgcccggggggccgctcaagttctcggagaagttccagctcttcacgcccttctccctgggcttcgagttccggcccggccacgagtattactacatctgtgagtggggtcgggccggggctgccggggcccgagtgggcggggacgcgggggcggggccaggaagtgggcgggaccactggggtggggccggggagtgggcggggcagcgcagtgggcggggccgcggtgtggggccaggggggagtgggcggggccgcggaatggggccaggggggagtgggcggggccgcggagtggggccagggccggtgctggccactgacccaccccggtcactgaccccctccagatgtcaagtgcatgatggacgtgccattctcccaaccatcccgggaggccaggactttcctcgtccttcgttgcatatggggaaactgaggcttggagggggactgaggctgcactattgtgatctcgggcctccagctcagaccacttggtggttgggccagtagacctggctcagccccccgatagcgagaccagggtgcccgagccccagcacactgatgagggaaactgaggcatccggagcccagcaggggaggggagcttggtggaagccacagctaggctgagtgctggggcttactcctgcaatcccagcactttgggatgccgaggcgggaggatcacttgaggccagcgtggacaacgtagggagaccttctctctacaaaaacataaaaacaattagccaggtgtggtggcatgggcctgtggtcccagctgtgcagggggctgaggtgggagggctgcttggagtgcatgagctctggtcgctccactgcactccagcctgggtggcagagcgagaccctgtctttaaaagaagaaaaaaaccccacagggcccctgccgcaccagccgcacccagactgggtaggggtctccaggtcctccctgccccgcacccacccccgcatctccccgggacccatgccaggctcggagactccctgaggaccgtggggtcttcatctgaaggttgggtggcggcagccttggggatagtcacatctgcaggaccccatggtgggccaggctgggtgggccaggctgagggaggctgccagtccctgctgcttatcggaggtccgaagctggcctttttgtccctacgaaaggccaacggcaggtggggaacacagcagcgccagccggagtcccagtcctgcttggccatgatatctgtgaccttggcgggggaatgaggggccaggcactgcccacctgagatggggatgatggcatcacactcgtggcttccgccgtggcgctgagactgagggattctcgtggagtggggaccccggcttctcagcatctcggggcctgagggatggggagtcagggatctggggtctgtgcccccaggctgcaggggggccagtgcctggacacccagctcctgctgtgtgaaattaaactttacaaggccccattgcctcctttctctgctctagttggatttttcccttttaattcagggaagaagcgggtgggggacgggggaaggtgtttaaattaagtccccataatatgagaaaaattacatttttctttctgagacggcagtttcataaagataattattgtaattattcgtcctacctctgtgatgaatgttatttttattacatgctttttatcttcatcttccagtgtgaggggtttctagggggcgggcagaggtggtggccatgagagccaggccatcaggggcccagggcccggcagagacagcaagaccacatccatgtgtgcgtgcacatggacccacccctgttcgattgtccacacgtgtgcacaccccagcggccccggcttcaggcgtccttttcctcctctcttgatccttgcagacgcccccactgcactccaggatgcttctgggggcccgaaagcaggggcggtgatgctggaattttgggcgtaagaaccagttggaaataatctttcccagccaggcgtggcggtggctcacgcctgtaatcccagcactttgggaggccgaggcgggtggatcacctgaggtcaggagttcaagaccagcccggccaacatggtgaaaccccgtttctactaaaaatacaaaaattagccaggcatggtggcacacatttgtaatcctgtttacttgggaggctgaggcaggagaattgcttgaacccgggaggctgagattgcagtgagccgagatcgtaccattgcactccagcctgggcgacaagagcaaagctccatcacaaaaaaaaaaaaaaaaaaaaaaaaaaagaatctttcccagagaatctactgtgttgccaggcgaggtccagagagggagcggcttgtccacaggctctcagaggcagagatttgaacccaggtcaatcatttcactattaatatatcacctctttgctgattgcttgaaaacaaatacatcattttccgagctcaccctgtgctgccctggggtgaggcagagcagaacaaaaacacagacacccccaggttctggggtcaggattggacagaaggaggagcagggggaatgtgcaggagactgctgggaaacagggggcattgtgtctggggctttgatgtacgattaggagttttaagggtggctctccacctggggtcagggttgattcaccaaggtggggaagggagtacagccccaggaggtctcaggcaccaagaggcacttccccactcatccccatcccctctcttctagctgccacgcctcccaatgctgtggaccggccctgcctgcgactgaaggtgtacgtgcggccgaccagtaagtgctcagggggatgggcaggatccaggcccccacccctgtgtcctaaacccacagaaccagtgagtgttcagaagagccaggacagggggcctcgggtttccctatcttgccctgccttgccccagcctcgatttccccgtctgatgaacatgtcagaccttcgagagtgaaggttagctgagcgcagtggctcacgcctataatcccagcacattgggatgctgaggtgggagaatcaattgagcccaggaggccgaggctgcagtgagcagagatcacgccactgcattccagcctgggtgacagagcaagactctgtctctaaaaaacaaagcaggccggttgggtggctcacgcctgtaatcccaactttgggagcctgaggcaggtggatcacctgaggtcaggagtttgagaccagcctggttaacatggcgaaaccccatctctactaaaaatacaaaatttagccgggcctggtggcgggctcctgtaatcccagctactcaggagactgaggcaggagaatcacttgaacccgggaagtggaggttgcagtgagcccagattgcgccactgctctccagtctgggtgatatagcaagactgcgtctaaaaaataaaataaaataaaaataaaaataaaaacagagtggccgggcacggtggctcacacctgtaatcccagcactttgggaggctgaggtgggtggaccccaaggtcaagagatggagaccgtcctggccaacatggtgaaaccccgtctctgctgaaaatacaaaattagccgggcgtggtggcacatgcctgtagtcccagctatttgggaggctgaagctggagaatcgcctgaacccgggaggcggaggttgcagtgagcccagattgcgccactgcacgccagcctggcgacggtgagactccgtctcaaaaaataaataaataaataaaaataaagcaaaaaaaaaaaaaaaaagattaaaagagtgaaggttgaattcaacagccaggtcccccacttcaggccaagtgactttgcccggagagtgggcatcggggatggcaccaagagggagcagagggcctgcctggtggggtgatgagcccgttgggcagatgtgcaccctgagggcgggcggcacgtggggagcccagtggggttcgggcggccgctgagcgtgctgtctctgccacccgcagacgagaccctgtacgaggctcctgagcccatcttcaccagcaataactcgtgtagcagcccgggcggctgccgcctcttcctcagcaccatccccgtgctctggaccctcctgggttcctagtcccagccccgcaggacgccgaccctgcctggacggccccgcctggaccgcctgacctcggccctccggacccggctgcggcccccgcctccgagaccaaatagagacgctgcttctccctcgcctggtgccgcccccgccgggcaggggccatccacccgccccaggaccagccctcagggaggggaaacggccgagagcccccccccggaggcccgaggggccggggtgtggatgcggaccgtggccaggccatctcctctggggcgtcggagaacccgggaacctcttggcgatttttttttttttttttttttttttttttttttttagtgtatttttcgtggttggatcaaaaagacttgagtttttaatttaatttattccctgccgttgtagcggggcggggtccctgtgccctggcctgggggaggggaacgcggaacatggggtcgggaacacagccgctcccctctgctctgcaccccactcgtgggggaacacagccgctcccctctgctctgcaccccactcgtgggggaacacagccgctcccctctgctctgcaccccactcgtgggggaacacagccgctcccctctgctctgcaccccactcgtgggggaacacagctgcagcccaccgcggacccccctggtgctccaggttgggtgagtctgagccggaaggggtacgtggtgggcgcccctcattgtggctggggagacctcataccccatcgcccacccccgtcctcctggtcatttcctcccagacactgttttgccccagcgcccttcggaatcacagtcccgccgtgtcttagaaactgctttggccgatgcaaacagccccctacccgtccccctcgcctcacacggtccctctccgaggccgagaagaccttctgttcctgtaaatacagccagcaagtgcaaactgtgattttattttccacgtattcctgaggacggactggaccgtctatgttttttcagcccttcatagggggtcttttattttggtgggggggtggggtggacttttagagtagaagctgcacttggcaataagctcgtgtcgtctgtcagagcccctctctcaactctgtgacctgataatgtttctaagaaaaagaaaaaaaggacaaaagggagggaaccactaccaaaaaaaaaaaaagaaactcctccccgaagacactttaatgaaggaaacaacacatttatacggatttcatatttctacccgcctttcctgactctgtgttttatatatattatatataaatatatattgtgtacggccgccggccggcggctcgaggcacgcccggtggtggggggtgggcagagggcttttgtagggggtcggcggggcgggccgcgttgccaggcctggagctggcgaccgggcctccctcttcccgtcacaatcaactttggattctgtatttttttataataaaatgagcataaacctcaaacgcgtgtgtctgtatgtgggggccttgccctacttgaaggagacttttgcattcctaatttggcggtggatgctgggcgtggtggtttactcctgtgattgcagcactttgggaggccgaggcgggcagatcgcttgaggtcaggagtttgaaaccagtctggccaacatggtgaaaccccatctctactaaaaatatgaaaaaaaaaaaaaaaaaagccaggtgaggtggtgcacgcctgtcatcccagctactcgggaggctgaggcaggagaacctcttgaacccgggagttggaggttgcagtgagctgagatcgtgcctttgccctccagcctcggcaacagagcgaaactctgtctcaaaaaggaaaaaaaaaattagctcggcgtggtggtgcacaactgtagacccagctactcgggaggctgaggtgagaggatggcttgagcccggcaggtggaggctacagggagctatgatcacaccactgcactccagcttgggcaacaaagcaagaccctgcctcaaataatagtaatagtaataataataataataatttagaggtgggtctggaatctactggggagaggggtgcggcttcgaggaacctctggggatccccagagctgtgaacctgactgattctttggttctgtgcatcgttttggggtcagaccttgggatgagcattttatagggcccgtatccttcatagccatccatgggcttcagtttccctctctgggaagtagcaacagcccacctagggctgggagggggcagctgggaggatggagggaggagacggggcctgtgcatggctggccctggggacaccgctggccggcacacacctgaacatggtggaattcctgggcctcaggatccaatcaaatgttgtgaaatctccactggcaagctctgcctctgtgtaactcagtttccccacctgctccaggccagggcaggggctctgtcatctcctaacctcttccccttgcaaacggcacatctgtaagttctcgggtcccaggggccttcatgccaggcacgccccgattgaagaaactgaggcacagagaggctgggggtgacgcggcaggtgacccggcccaggggactgaggtctttacggctggacgatggtcgcctgcatcccacccgccgtgacgacggcgtctccggcacaattagccgagcgggaacgctcccagctaattaattcagctgcgctgggcccggtgacgggggccgcctcctaatgaggcagcccaggcacaaagacccctgtgtgtgccccgccccgcccctgcccagcgcggggtggacgcacggaggcacagagggccggccggccaccgtgctgagcaccgcgggggaggctccaccatgccccactccacagaggaccccgaggctcagagagggaggcgacccccacagcccattcatgccgagacccccaccccaaactgcaacgtgaccactgggacagagaggaccaaggacagaatgagatcagggatcatgagaggcatcccagtgctgactgtgatgctgttacaaaaacacaatagtgtccttccctccattttaagtacaattgcatggattttagtgcattgagacttgtgcagccatcagctctgattccagaacattccatcaccccaaaaggaagccttgtccccatcagccgtcactccttatcccctcccctggcaccaacgtatcccctccttccctgtctctgtggatgggcctgtcctggacgtttcatggaaatgggtcacacactgtgtggccttgcgtgtctggcatctctcactgagtgtgacgtcctcaaggtgcatctgcgctgtggcctgggtcagagcctcgctccttttcacagctgagcacgttccggtgcgtggaaggaccacgctgtgtttatccaatcatctatccaggggcacttgggtactttccaccttttagctattatgacaattgttaaaaatacaatttattattattattgttttttgtagagatggggtcttgctatatttcctggctggtctcgaactcctgggctcaagtgatcctcccgccctggcctcccagagtgctgggggtgccaggcatggtagctcacccctgtaatctcaccattttcagagattgtctctaaaaaacaaagaacaaaaactcacaagccaaacttcttgtgattacagaagtgagccaccacgcccagccaagatgctttttttagatttattatttaactctgtattatttattagagacggggtctcactctgtcgcccaggctggagtgcagtggtgcgatcacggctcactgaaacctctggctcctgggctcaagcgatttgcctcccgcagcctctgagtagctggcactacgggcatattgtgacaatcttattatttttgagacaaagtttcaatgcaaaaggtgactttgctttttcgtttttgtttttgtgtttttttgagactgagtctctctgtcacccaggctggagtgtaatggcacgaacccggctcactgcagcctccgcctcccacgttcaagcaattctcctgcctcagattcccgagaagctgggattacaggtgtgtgccaactcgcccagctaatttttgtatttttagtagagatggggtttcaccatattggccaggctggtctcaaattcctgacctgaagtaatccacctgccttggcctccgaaagtgctgagaatacagacgtgagccactgcgcccagcctaaaaggtgactttgggtaaatacacaaagaatggctgagctcctgcctctgggcctttgcatgcactgtccccccagcccaccccactgccccgatgaacctctcttgcagattgcagccaggctcccccactcagccccttccaactcagctcagatgtcacctgagctcctggccaggaggctgtgggtgccctttgtgactgtttacttacctgactcctccccaggctgcagccgctaagggcagggctgggtctgtcctggttatcgccgggaccagtgctgggcccagagcagggaatctcctgggaccgtgtcattggccacacgcagacacgtgtacacacacacacgcgtagccctgcgcttgcacctccatgcctgtgtacccctgtgtcgccagacacatgtgttttgggcccgagcctctcaggaactgacctccactcccgcgccagaccctgaccagaccctggtgcctgtcccagtggctgcatcaacgtgtcgagtggccactcactccaggggctgtgctgggatgtccccgccgggtgtgggcgctccttggggaacctggttacccccgaccccagccccagtgagaccccaatgccggctcctgccagccctggacggccattggtacgctggtcccgcgcagagtcttttccgcccagaggatcctgagggaagtcatctccctcctgccggccagttactgccgcctcggtgcccgccgcgggcagggggcagcgggaggctgctaggggaaaggaggcctgaggcgcccaaaactcttgagtgcggcttggggtggaacgtgccgccccccacagccccggtggcccagggcagggctctgcatccccccagacctcaccactgagcctcagtgtgcctgtctacatctgtgtttgaggagaaaaccccttggtccccaccctctggtccaaacagccatgatggaggggggctcactttttttttgctttttagaaatggtgtctcattcttcaccctcaaaactgaacggaggctgggcatggtggctcctgcctgtaatcccagcaattttggagactgaggcaggctgattgctggaggccaggggttcaagaccagcctgggcaacagggtgagacccccaccaccaccatctcggcaaaataaaaattaaaaaattagccaggcatgctggcacgcacctctggttccagctactcgggaggcccagggggaaagatgctttgagcccaggaggttgagactgcattgagccatgatcacgccactgcactccagcctgggtgacagagccagaccctgtctcaaaaaacaaacaaacaaaaatactgaacagctcacaccagtaatcccagcactttgggaggccaaggcaggtagctcacttgaggtcaggagttcgagaccagcttggccaacatggtgaaaccttgtctctactaaaaatacaaaaattagccggccgtgatggcaggcgcctgtagtcccagctactcgggaaggctgaaacacaagaatcgccttgcagggatccaacagccacatggcagtaatgagaggctccagaaaagaaaagaaaacaaaacaaaacaaaaataagaaaaacaaacaaaataaggagaagaaaaaaaaaagaagcccccccccccaccatccccagaggccacagcactctgtcctctggtcccccaacccagccctgacacctgcttcttccccagggcacctctcactcacgggtgttccctctttgccctggctggcacacccttcccgagtctcctctgggctctccccacctttttttttttttttttttttttgagatgaaatttcgctcttgccgcccaggctggagtgcagtggggcgatctcggctcactgcaagctccgcctcccgggttcacaccattctcctgcctcagtctcctgcgtagctgggactacaggcgcccaccaccacgcccggctaattttttgtatttttagtagagacggggtttcactgtgttagccaggatggtctcgatctcccgacctcaggtgatccgcctgcctcgcctcccaaagtactgggattacaggcatgagccaccgcgcccggcctatttattttattttatttttttgagacagagtctcactctgtcgcccaggctggagtgcagtggcacgatctcagctaactgcaagctccgtctcccgggttcacgccattctcctgcctcagcctcccgagtggctgggactacaggcacccgccaccacgcccgctgttttttttttgtatttttagtagagaccgggtttcactgtgttagccaggatggtcttgatctcctgacctcgtgatctgcctgcctcggcctcccaaagtgctgggatgacaggcgtgagccaccgcgcccggccactggggccactttctatcaaccacacctggctcgggcatgcacctgccctcccccatgcatacaggcccacatccatgccttcaaatggccacaaaagtgtgcgtggccatagacatacatacttgcaagtgtttctctttttgttttttgttttttgttttttttgagacggagtcttgctctgtcacccaggctggagtgcaatggcacaatcgcagctcactgcaacctccgcctcctgggttcaactgattctcctgcctcagcctcctgagtagctgggattacaggtgcgtgccaccacacctggctaatttttgtatttttagtagagacagggtttcaccatgttggtcaggctggtctcaaacccctgacctcgtgatcctcccgcctcagcctcccaaagtgctgggatgacaggcgtgagccaccgcgcccggccttttttttttttttttttggacgcagtctcactctgtcgcccacgagtacagtggcgtgatctcagctcactgcaacctccgcctcccgggttcaagcgtttctcctgcctcagcttcccgagtggctgggactacaggcacgtaccaccacgacccgctttttttttttttttttttttgtatttttagtagagacgggttttctccatgttggtcaggctggtcttgaactcccgacctcaggtgatcctcccgtctcggcctcccaaagtgctgggattacaggccgcgcccggccatctccacctgcttgaaggtcttgccgtcgtagacgcccaccgtgctacccaccatcgcgggcaggagaagcacgtcccgcgggtgcgtcttcaccacttccggcttctccgtgggcggcgcccccttcttggccttgcgcaggcgcttgagcagcgagcgctgcttccgccacaggcccgggttcagccgccgccggcgcgcgctgttcagctgcatccgctgctccgaggacatgtccagtagctggtccaggtccacgccgcgctgggtgaagttgcggaaggtctgtttcttctgctgctgtacctctgccgtcttgctgcatcctcagaatagctctccaggcccttctttatgagacagggtcttgcctttgttgcccaggctggaatgcagtggtgtgatcatggctcactgcagtcttgacttcttgggctcaagggatcctcctgcctcagcctcccgagtagctcgaaccacaggtgcacaccaccatacctggctaatttttgattatttgtagagatggggtcttgctacggtgcccaggctgatctcaaactcctgggcccaagggatcctcttgcctcggcctcctaaaatgctgggatcacaggcgtgggtcaccgtgcccggcaagctctgggtcctcctgcacggtcgcctggtggagcagaaaccaccgccagcggctccccgtctatttgtctgtgcacattcctgggctcagacggtggcttccgaggccggaacttcggagtcacctgctccgcacttgagtctggaacgtctcagaccggacccctccctttacagcctgagagagggagagaccctgcccaggcctcccaggggcctgcccacccgacagctcctgactcccccaccctcattggtccagaaatggaaggcttcggcccaggagcgatcaatgcaccctaatggacatgtgtcggggggggggggaggggcgctgagtcgcaggagacacccttccctgtgcagagggggaaactgaggccactcccaggccccatgggtcactggcccgaagcagtgtgagccctgccgggtcaggggttgcatctggagcagcccagggagaatgaggctggggacccttcattccgggggtcattagggacaccccaccaggctgtgtgtgcccagggtggtctcttccccagctccgactgccccgccgggttttggggcttacggttctgtcctgggctcaagtcctggctcccaccaggcactgtggggcatcccctctgggtctggggtccacagtgcctgtctccaggcgtgagagaagcttctagagacaatctgtgagcatctttcccatccctgcctctccccagctcaagctccgaagggaacgtggatggcaggagagaggagggaggcgtggggcgagtttatctctcactggctttctccgcccccacctggcctcccctggggcttctgtgattctttgttttttttttgaggcagggtgtttctctgtcccccaggctggagtgcaatggtgctatcgtggctcactgcagcctccacctcctaggctcaagcaatcctcccacctcagcctctcgcgagtggctgggaccacaggcacgcggctccatgctagctaattttttttattttttgtagagatgaggtctcgctgtgttgcccagactggtcttgaactcctggcctctggtgatccttccacctcagcctcttgggtagttgagactgcaggcatgagccaccacacgtggctaatttttgtttatttatttatttatttttgtagagatggggtttcaccatgttgcccagactggtttcccaactcctgagctcaagggatcctcccgccttggcctcccaaagtgctgggattacaggcatgagcccagtctgagacccactttgtagataaggaagatgaggtcagagaaggggagtgcccaggccctgggccccacagccgggacccctttagggtccagtggatggcgaaggggaggcggcctgaccactaccgactccagccagtcgccccagcctccagggagagcagcacaggtgcccagagaagcgacgaatctggatatttcttccccacatgaggaggagctgggggcacctgagtgggtggtctcggtgctgggcggtcctcatggccccctaagcgtcgaaaaccagagcttgttatgatcttgtgatgggaagggggcccgcctctcgcagggaccgctgtcggccccctctgcccgcccaccaggcgctagagttatggtttgcaatatcccatgcccctcccagcctgagcattaatgacggtggtatccgagtccccgagcacccggggctgttattaacatcgtccatcacgcttgtggctgcggctctagaagctctttggctaggaggggaaactgaggcaccgagaggttcgccttgacccctgcgtgagggcacagctgcagacatcggataagcccaggttccagtgccctctccaccacccgctgtgggtgaggcccctgttctctgagcctcagtttgctcatctggaaaacaggctagtgacacagggtggggtctcagatcctgggggctcttgatgagcagaatcgccaggcccatggaggcaggccctttgttgcctgatctccccgccttccctgtgatcccattgtctggcacaatgccagcaagccctcctcggatgtttgttgaatgactgaatgagcgtgttgtgtgtggactctgagtcaagtgctctttcttgccaactgggaaagactggaggcaaagggctcattctccatcattcactcctccaggaaggcctagggggcaggggtggtggtggggaacggcctctcgcaggtgaggggggcagcgggggaaccgcgggagtcagccgtgctggctggcagatctttaaattaaaatgcatatatacaccagataaataaactcggcccacatcctggtgacaggcagaattaagttgcccagttggggaccgggcagcgaaggctgggggtggaaggggatggggccgaattaccaagggcggcgactcagctccatcctctgccacattgtatcccatgaacgttcctgagacccctgtcctgccgggtctctgggaagcgctgagggggtcagggagtaaggacccaaattctgagccccaagttgggcacccaggatctggcccggcttagagagagaccagctgcccacggggtgccctgggtgagtcagtgtcttcgtctgaaacagggagaccatggccccccgtcccagcacagaggctgcccttggcagtgggcatggggcggacctggttcaagtcccggctgagcactcaagggctgggagcagcctccgtcgggtcaggtaccagggagaccccgttctagctcccagggaggcccccgtggggcccgcacagctgcagggtcctccctgggcccttccctctgacccaagcccaggggagaggggcggagggggcggcgggcagttttcaattacggagcagctaatctcccagtgagggccgttctggggcccagtaaatctattatgaaaagcctctaaatgtatgtaaaaccggcctccgacaatccggggattaggccgccgggaggggaaaccgaggcgcaggccgcctggcggattagcgcagcggggcccctggagggttggggggagcagtccccagaggtccagggcagagggagaggggtcctctgaagaagccagcacccattttatagctggggaaactgaggccggggaagggccccccccccccccccaccaggggtcccctctcagcgtcaagggcacttttgccagccgctcctgcctttgtcgcaaacccaggggtattttcccacaaggtggactcggtgggtttgaaagatggggagctggggacccctggacccggcttaaggctccgtggcccggcccgcatctcctgccgccgtcgcaggccctttgaagctgccccatcctttggtgcttttgaaatgtctttattaatcacctaccgtttgccaagccagaggtggcaaaggtaacaggagacgggagcccagtgccctggcagctcagggcactcgccaaagacgaaggcagccgggagaggccttccccaaggactcccgcttccgctgggaggtggggaggaggaggtcaccccacagaagtgcggtgaggccactgcaggcgcgagggaaggcctggtggccgaagggaggcgtgagctgagaagccccgtgcctgggctgctcctgagggtggcagggagccctcggagggcttgaacctaagtggcccctgcagcatccatggcgggaccgtggacctccaagcccgcctccctcggaagcacagcttcctcagcgtggccccacactctcccaggctcacccagccccctcgcatagggcctgctcaccctcctgcctgtggggcccttggtccagcagtttcctctcctgcacactgtccccacctgctgaagtccgtccaggagcccaggtgcatgatgggagggggtgatgcccctcctcacccccacctagtggagtttgcaggcagctctgcagatcgcctggcagctggagaaactgaggcataaggctgggcgtggtggctcacgcccgtaatcccagcactttgggaggacgaggctggtggatcacctgaggtcaggagtttgagaccagcctggctaacatggtggaaccccgtctctactaaaactacaaaaattagccgggcgtagtggcacgcacctgtaatctcaactactcgggaggctgaggcaggagaattgcttgaacccgggaggtggaggttgcagtgagccgagattgtgccattgcactccagtgtgggtgacaagagcgaaactccgtctcaaaaaaaaaaaaagaaaaaattgaggcatgagctgacagctgtttctgcaggcctcaggcagcacccgatggggccttcccagggcccctggcctggcccggctccagccaccagcttgtccctgcctcccaggtgctggggaatgaaagggaggcgagtgatttctctgactccttcaggcccaggcctccgaattcctccaactcccaggtgaggggttgtgcaaagctgcagcagggtgggaccgtcccagtgagggtgattctggagtcggccatggtgggcctgctctgtgacctgggagggggtgtgtgcctgtctgtgactcagtttcctcgtccgtgtcatcagcaacggccaaatgccgttcccagcactggatgggggtggagggcctgaggggtgtgggtgggggggagctccaggcgcccctgccccccgcccagccgtcagtcaggctggccgggcccccttcaagtcgtcacggcccagcagcggccacgggagggattattccggcctgtccagggtggactgaagtggaaccaaggctgacgagcggaacgcgcccccatggacccagcccgcccgcctttgtccgccgccagccccccacccgcctgccgtcacagaccccgcctcccgtgcctgagccccatttctctgggggccgggctgcctcgcgtggcccccgcctgactaaagccatgcagcttctcggccggctccatccgctggctgcctcagtttccccctctgcagcatgggcatacagggttcctctcgtcggctcattggctgctgaatgggggctgtgtgggcagaggctctcccggggctttcccagggtgctcgggggtccctctgcccggtccctccactgtgcctttgtccaggaaattcgaggtggcagggagaacggatccgctctcggcctgaacggagccgcggcaaatgctgttgacccctgaccccggccccctaatcccggggttgaggctctcaccggagaggggccctgggagatgagctggggcacgacccccgccccgggcaccgaggggggcttccaggtcagggtcggagaggcttcgggaggacgcggctgccccattggccacgtgcccggtcatcacctctcggaggccaacacgggaaactgaggcgtggaggagccctcctaagccccacagctctgggatgggagccaggcctagccacctgcagggagagagacacggccggcagctgcccctccctgagtcaccaaacaggaattccgggacgtctggctggccctggaaggcacggctagcttacaaacccccagtcttcaggaacctctctgggtacctggcccctgtgttccccggggaggccccaggatccccttgtctggaacagggggaggggcctttctggccaccctctgctgctctacatttacccagtgtcttcaggaggaagaaatgaatgaatgaatgaagtggaaggtgtcctcatgcctgccagctgctgcagtctagcccccgtgccttgtggctacttagaggcctcagctagcagcatccaccgcagattaaaagattctccgtcggaggctgggatgcgctcacacgcttgggcgcccctgcgctccccggtggccgtgtgtctgttccaccctgccgagctgttccccacgatcaatttcaatttggcctggtctctgcctctgcagcacgaccctccttgggggccgacggcggggaaggagttgctggcttccgcagctctccccccaggtccctgggaccctcgcctggtgaagagagagctctgctgggccgcctctttttccgggcctcagtttctctgggtttggaatgagggcacagggcagcgcagtgtggacccagcctggttttcatccaacctcatgaagtcactgaatgctcgccgtgggcctgaccctgggctgaaccctggggcaccgtgggggctacggcaggcaaacgagtcggaggcagaggaagggcgttcctgcaggggggaggctgtgtgcagaggggtagagggagggaggcaggagggagcgtcctggaagaaacagttaaggtggggccacagaggagggtggacaagcctaggcaacaatattcctcaacagccgaagtttgtgtatttgttttttgagacagagtctcactttgtcactcaggctggagtgcagtgagctgaggtgcgatctcagctcactgcagcctcaacctccctggctcaatcgatcctcccatctcagcctcccaagtaactgggaccacagttgtgtgccaccacgcccagctaatgtatttatttatttatttatttagagacagaatcgctctgtcgcccaggctggagtacaggggtgcaatctcggctcactgcaacctccacctcctgggttcgagtgcttctcctgcctcagcctcctgagtagctgggattacaggtgcaccccaccatgcctggcttatttatttgtttattatttatttatttttgagacagtcttgctctgtcactcaggctggagtgcagtaatgcgatctcagctcactgcaacctcgacctccctggctcaagtgagcctcccatctcagcctcccaagtaactgggaccacaggtgtgcaccaccacgcccggctaatttatttatttgtttatttagagacagagtcttgttctgtcgcccaggctggagtgcagtggtgcaatctcggctcactgcaacctccacttcctgggttcaagtgattctcctgcctcagcctcccgaggagctgggattacaggcacctgccaccacgcccggctaaattttgtaattttagtagagatggggtttcaccatattacccagactggtctggaactcctgagctcaagtgatccacccgcctcggcctcccaaagtgctgggattacaggcatgagccacccaccacccggccaatagccaacatttattgagtgcttactgtgtaccaaacgtcagccgacaggctttccctgcctcatctccctgcaacctcccaaggatcctctaatacccattttacaaatgaggagacaggccacagacagaggccgctgtgaggtgagggaaggaggccacggccatgctggcattggcagcactggtccagctcagacctgtccaggtccccagcaggactgcggtgcgcctggctccttcctctgcgcgctccattcccttgctgcttccttccgggcctccaggcttccctccttttctagggtggcggtggaggaacctatatgggctcctgggtgctggagttcgatctgaaccttcccgctcattctgcgtgaccttgggggcgtgcctggccctcccgtgcctcagtttccccagccgcacctgccggactgtgaggccccgaccccccgccctctctggcccccccgcggctccgggctcaggccgccgctaggtggagcgaggaggccggtggagacgcggtgcggggagacgcgcgctcgggagctgcagaggccggggagcgggcctggcgcgcgggtagagctgcgtggacgcccgcggcccttggcgctcagagctcccgccccgcagccagcgcctctaggaggcccagccggacagtctgcgaggggcgcgctccgggcgcaggaggggcggtgtccggggcgcgtggtttgggtcgtcgggacctggatcccggagcaggcaggctgaggtctgcatggtcagggcggcctcaggtgctggggagccaccctggctggacctagggtcccagcttcacgttcacctcctggagcctcaggtctgggtctgatgccccaacgggaaccccaagccctgcccaccgcccgtcctcacctctgctgccccttcactgccccgaccagtggcttccgccataaccctcttgggagacccatttttcataggaggaaactgaggcacagagcgttttctcggtcacagaacagctggatccctcctgtgtgatgagcacctctgggtcctcctgtgtcgtgaccacacctgtgtccactttctgggtcctgggctgcagaatgtcaccgccccaaataccctctcgtgggtgctgtggttggtttccttggccttgggagggtcctttctactcaggtagggataccgtctgggttccccccctactgcccctgcaaggcagggctggtgatccgtgtgcaccctgggggccgtctcatgtgtggctgcaccttcccacaccacggctgaggagaggatcctacccacaggtgcccctggtgggttcagccggcccctgccgcgggatcctgcttgatttctggtactccaggcctcgccactgtcattcccgctgggcatgatgcgcacctgctgtgccatgctcttgggcagctctctggggtcacggaaacttctgtgcctcagttgcctcctctggaatgtgcaaatccttcgagaaataagctggaagacctgggagcaagcaggcttgggtttccaggtttggggggggggtgcccagatacaaccccaaggctttgggaggtgaggggacaccctgctgctccatctggacccgcgcccgtgagctctgctgctctgcgcctgacccacagctctgtccacttgccccatatgggttcaaggcaccaagaatcaagaatccagccctctgggctggatgcggacacggtggctcacgcctgtaatcccagcactttgggaggctgaggcgggtggatcacctgaggttaggagttcaagaccagcctggccaacgtagtgaaacctcatctctactgaaaatgcaaaaattagccaggtgtgatggtgtgggcctgtaatcccagctactcaggaggctgaggtagaagaattgcttgaacctgagagagggaggttgcattgagccgagatatcgtgccactgcactttagcctgggggatagagtgggagggatcgatccagccctctttcatccccttcccgctcactccgacccaacctcccagttctgtctttaaaacaagctgcttttgtctctgccccagggcctttgcacgggctgctccatccctgcatgtggccagcccagcagctccctcactgcccacctgtggccggctgcatccctccaatcttcagacacccatttttttttctttttcttttctgttttattttttttgagatggtgggggtggtctcggtatgttgcccaggctggtctccaactcctgagctcaagtgatcctcccacctcggtctcccaaagtgctgggatcacaggcatgagccacctcgcctggtcttgacacttattttcatgttcagtttgaccatatttgtgacaagtcagagacgatacagcaaggggaagaagacacgttcccttccctctagaaagtcacagtcacgcacagaaggcagaaggcttgcagtgcacagcgacgggataaaggaaccagctctgcaacagagtgagtggctctgagcttttgatcattgagatataattcacagaccatgaggttcacctgcttaaagcactgagctataactcgcggaccatgaggttcacctgcttaaaggtgtaatccagtggcttttagcgtacttgcagagttgtgcaaacctcacctctctctagttccagaacgttctcatcaccccagaaggaaaccccatccccattagccattgctccccatccccaccccagccctggcacccaggcatcccctctctgcctctgtgggttggcctgtcctggacacttcatagaaatgagatcacagactgggtgtggtggctcacatgcctgtactcccagcactttgggaggccgaggtgggtgggtcacctgaggtcaggagttcaagaccagcctggccaacatggtgaaaccccgtctctactaaaaatacaaataaattagccgggcgtggtggtgggcgtctgtaatcccagctactcaggaggctgaggcagggagaattgcttgaacctgggaggcagaggtttcagtgagccaagattgtgctgctgctgtccagcatgggcaacagagcaagactctgtctcaaaaaaaaaaaagaaaactgaaactcagacagcgaccctcctctgcctcagtcctgcggtggctccatgtgccccaggattaacgcacactccccggcctggcggcacactttgctgggcacggggcgagaccagaagaacccaaagaggccagagggtcccagctcagcgaggagtgggaggtgcttccttctacccagataagagcctgggagagctgggagagtgggaagtggggtcgccccgattttccagggcaggaaaccaaggctggggccttgggctaacacccacgtcaggccccgggtctcgctgcccagaggctccggtgagtgaagctcctggcagcgtgcacctgcgcccgccggacccgcctcccacctgccattcctgccggggagggaagggccactgtgggcggctcagggcccccaccgctgtttccgggctcttggtggggtggggagggccgctgtcagagaccccctgagaccctcgggaacactgcctgcctaatgaggatccctggggcctctgcccagttcgggccggggaataaaggcctcctcttccattccgctgtttctccgccccccgccgtaataggattgagacttttgaagttaataggaaatgaggcaggctcccacgtacagaatgcggacgcggagggcttagagggccctttgtgagcccggccgggcggctccccccgccggccggccgtgatgaaagcaccgtgaaatatacagtggcaggacgccccttgaccctgacaggcctcttaaagaaaagaaggggggaaaatcccccagcagttgtacatgtgcatgtgaacacacgtgtgtgtgtatgcagcgctctggcccggccggccactgggacgctgtctgcacggcgcccacgcggggcctcggctcagccaggagggttggggatcattccagcagccaggagtttgggtttttttttttttttttttttttttttttttttttttgagacaagagttttgctcttgttgcccaggctggagtgcagtggcgcgatctcggctcactgcaacctccgcctcccaggttcaagctattctcctgcctcagccttcctgagtagctgggattataggcatgcgccaccatgcccggctaattttgtgtttttagtagagatggggtttctccatgttagtcaggctggtctcgaactcccgacctcagatgatccgcctgcctcggcctcccaaagcgccgggattacaggcatgagccaccgtgcccggcctgtttgttttttttttgagatggagtctctgtcacccaggctggaatgtagtggcgcaatccctgctcactgccacctctgcctcccaggttcaagcgattctcctgcctcagcctcccaagtagagtagctgggattacaggcacctgtcaccatacccagctaattttttttttttgtattttagtagagacggggttttgccatgttggccaggctggtctcgaactcctgacctcaagtgatccacccaccttggcctcccaaagtgctgggattacaggctcgagccactgcgcccagctgagtttggggttttggatgctgggcctgagagtcagaggccattcatcactcagggcagacagccccacccaaggctcggtcttctctactaacacacctccagagacggcaggcttaccacttagcaagactcctagacaaggcttctttgcgtgtggctccagaggaaggtgaagatgacacctttcaatgtcactaaggaaaagtgacaagggacagaagggaaggcaattttttttttttgagacatggtctcactcccattgcccaagctggagttcagtggttctgtatcacctcattgcagcctccacctcctgggctcaagtgatcctcccatctcattttttcatttttttgtagagatagggtctcactacattgcccagactggtctcgaactcctgggcttaagggatcctcccacctcagcctcccaaaatgttgggattacaggcgtgagccaccgctcctgcctcagcctccacagtagctgggattacaggtgcctgccaccatgcccagctaatttttgtatttttggtagagacagggtttcatcatgttggccaggctggtctcaaattcctgacctcaggtgatctgcccgcctcagcctcccaaagtgctgggattacaggtgtgagccactgcgcccggcccaagaaggcaatttctaaaacagctttattgagttattcacatagcatacagttcattcatttaaagtatacaatttttttttctttgtatttttagtagagatggggtttcaccatgttagccaggctggtctcaaattcctgacctcaggtgatccacccgcctcggcctcccaaagtgctaggattacaggcaagagccaccacgcccagcctaaagtatacaatttctttctttctttttttttttttgagacagagtctcgctctgtcgcccaggctggagtgcagtggcaggatctcggctcactgcaagctccgtctcctgggttcacaccattctcctgcctcagtctcctgagtagctgggactacaggcgccttccaccacgcctggctattttttttttttttttttttaattagagacagggtttcacggtgttagccaggatggtctcaatctcctgacctcgtgatccacccacctcggtcggcctcccaaagtgctgggattataggtgtgagccaccgtgccctgccttgatttcttttattgtcttcataaagctgtgtgtccatcaacccaatcaactttagaacatttccatcattccaaaaggaaaccccgttccctccccagccctggcacccacacttcccctccctgtctctgtggatctgcctgccctggacatttcatagaaatgggattgcacacctgtggccttctgtgtctggcgtctctcactgagtgtggcgtcctcaggatgcatctgcgctgtggcctgggtcagagcctcgctccttttcacggctcagtcgtgttccagtgggcagagggccatgccgtgtttgcccattcttgtgttgatggacatttgggctgtttcagacgtttctgagtgtgtagggaatgctgttcttgccaactcttccagtggccctggatttgggcctttgaccctcacagaaggccaagcagaggctgggcaggtcccaccaaggccagaagcagagggcgtgttccccagcagggcctggtgtttggagcatgacacatggaaacagcttccaggcatgaccctgtgtctcccagctggccctgccacttctggaggtgaccctgccaccctgtgactctgtttctccgtcggcaaaggcggcggtgatggggactctgtggtggcagctattgtcaggcagcatggcagctgcacacgggggctcgcccatgtgagggaggctttccgcaggtggtccctgtccctgtccctgttcgcatggtcctgcagacggccgtctcacccccataccactggcgttggagggcagattgggcgtgaggagagggtgaatctgtgtccagggctccccagttttccgttcagacccgtggggaggcgactttcccgctgtgggctccagcatcgggaggggtggtctgtgtggagtgacgtgtggccctgtccccgctacgagaaatcccggggaaaggaggggtgaagggggcgggagggggttcctggaatctggctgagcttgggtggcacccaaggatgcctgcagcccgcccagtggcacgggaagccccctcacccgctggctggaaggggtgggaggcaagtggcaggaggcaggtggatgggttgcctgttcttccctgggggcgccaggggaagacctgtccctgccagagcaccgcggctggcagcccccagccctttggtggcagctatgccctggggtgggcagggtgatgcgtaggtcatctgcccctgtggtgggcccagcgccctcctgtcttctcagaccctccagaggaggcaaaggaggtctctcaggcagagcgagaacatgtcattccttcagggacagcagaaccaccacaggtactgcccacctgggtcagacatcagagggacagagacagagagacagagacagtcagagacagagagacaaagggagacagagagagacagacgcaggcagacagagtcagagatggagggaggaagagacggagagacagtgacagagacagaaggagacagagacagagagacagagacagagggagacagagagacagagatgggggagacagacaaaaacagagagacaaagacagagacagagggaaacagagagagggagagacagaaatagagataaacagagacagagagggaaggagacagagaaagagacagagagacagagggagacagagatagatcgagtcggacagagacagagaaagagacacagagagacagagggatacagagatacagcaagtcggagagagacagagagacatggggagacagaggcagcgcaggggcggctgtgcagggcgatgggccgagggctccatcccggccttcctggcccctgggccccccgcctcccagctgtgactggcctgctctggccttgggctccgcctgacttttctgggtttggggttgagggtgcaggaggccctggcagggcaggactctgggtccccaggggccgcctcaccatcctgcccccggggtcacagaacttgggcatctccccatcagtgggcgacacgggcccagcagggactcgggaaggggctggggcaccctgggctctgctcagcccgtgtcccaggagcttggcaaggggcgcacagccagcccacagctaactgctgaggggaaccctcctctcccaggtgccagcccaggtgggggcagggagcctcaggccctaccctcgggtgctcacagcgtctcctggacttagcagaggtcggtgaggcccgaggaagcttcatgctggggtctcggtgcaggaggtggaggggggatgggaaaaggcttgaagggagggcccggatccatcaatggacactgaggctgcttggtgtctcctggaagatctgttcacatcctggcccctgaaacttgtgaatgggactttatttagaaatagggcctttgcggccgggcgcggtggctcacgcctgtaatcccagcactttgggaggccgaggcaggcggatcacaaggtcagaagatcgagaccatcctggctaacacggtgaaaccccgtctctatgaaaaatacaaaaacaaaattagccgggcgtggtggcggcaggcgcctgtagtcccagctactcgggaggctgaggcaggagaatggtgtgaacccggaaggcggcgcttgcagtgagccgagatcgcgccaccgcactccaacctgggcgacacagcgacactccgtctcaaaaaaaaaaaaaaaaaaatagggccttggcagatgtgaccgagttatgacgaggtcgttcgagtgggcctggcgcagcgtgactggcatccatataaaatacacatgcattgattgggcactggtgaaagggaactacctcagtccccacctcaggatgtcgcataaccggtgtttatggcaccaaaaacttcatctctgtaaaccacttggaggggtgtctggcaccaagtccatgtccatgagtgtctgaaaatagcataaaaataaaatagaaaaaaagaaagagctggtgcctaccctcggggagcctacaggacgtgagcttgaaagagctggttatctccccgtctctctgtctctctctgtcttggaaatgtctaagggggcaggcaggagggcttcctggaggaggggtcctttgagctgagttcagaagggcgagaaggagccaggtttctcatggagcagccaatgcaaagggctgggggccacctggagcctggtgtgtccttcgggcagctggtgtggctggagcaggggatgccaagcctgctgagggcttcatgggccgcagggaggagtttggtttttctcctgagggcactggggagccacagcagagtttagagcagaagaaggacacaatttgtgccctgtgcccgtggtgagcggcgagcagggagggctgcctggaggcgggtaaggacctcagagcggaattctgccacagtgaagctttggaggaaatctttcttccttttctcttcttttcccatcacgggttgagaaattggagggaggggcattgctggggcttcctgtgcccgcgtgtgcggggggttctggggcctgctgcctgcctgagccagccccttttcccgccagaggcctctcgtcagtccccgggggggcccagtggtgaccttgggcctcggggaacatccagacctgggtcagtggcctcggcaagtgcccgggggatccgccctccggtccccgtgccagtttccacagcgggacaggggggtcccgggggccgggagtccgcagccccgaagacctacgctgccgccagccacacccctgggggtccgaccctcctgggtcccactttacagatggaggaactgaggcggtgactctaatcttcgcccggcctgagtcgcggggctggaacccgcagcgtttgccgattcccagggcccgagcgctccggcgagtgtgtgtgtaacgccctctccctggacgcctcgagtttaggaaacggcggagccgcccggattgaaattctcggcccgtgcacgcccggcggagaaatccatgacgcattgtttagacagacgcctttaaaccgcgccgcggcggggggcggcggccgggggcgcctgcgcggggaaggtcaccctttttttctgcacaaaggtcagccgtagaccgttgccaagacaacggccggcgtaaagatggaggcttaaggagaacagacagttcccctcccgaagatgccccgtgcaaagggcccggccgtgggcttgggaggctcagggggtgtgaggagctgagcgccggagcagagagagcggagagtggggcgctgggatggctctgggaggccaggaaggaatgcgggggcctggggggcagatcttggctcaggccctgccaggctgtcttcaaaccaatgagcctcagggttcctggctgtgaaatgggaacaacgtctgcccttcagggtaggcatctccaggctggtctggtgtgggaaccgctgtgttaaacatgcagactccagccaggcgccgtggctcacaccaacggggcacagtggctcacaccaacagggcacagtagctcacacccgccgggcacggtggttcacaccagccgggcacggtggctcacacccgccgggcacagtggttcacgccagccaggcacagtggctcaaacccgctgggcacagtggctcacaccaacggggcacagtggctcacacccgccgggcacggtggttcacaccagccgggcacggtggctcacaccagccgggcacagtggctcacacccgccgggcacagtggttcacaccagccgggcacagtggctcaaacccgctgggcacagtggctcacaccaacagggcacagtggcccacgccagccgggcacggtggctcacgctaacagggcagagtggttcacgctagccgggcatggtggcagtatgccagccgggtacagtggctcacgcttgtcatctcagcactttggtgtttgtttgtttgtttgtttttgagatagtctcactctgtcgcccaggctggactgtagtgacaagatctgggctcattgcaacctccgcctcccgggttcaagcgattctactgcctcagcctcccaagtagctgggactacaggcatgtgccatcacgcctagctaattttttgtacttttagtagagacgcggttgcaccattttggccaggctggtcttgaactcctgacctcgttatccacccgcctcggcctcccgaagtgctgggattacaagtgtgagccaccgcgcccagcctcatctcagcactttaggaggctgaggcgggaggactgcttgagtccaggagtttaagacgagctgggcaacatagtgcaatcctgtctttattttaaaaaatacaaaaaaattagctgtgcatggtggtgtgcatgtgcagtccagtcccacgtactcaagaggctgaggtgggaggatcttgggagcccaggaggtcacagctgcagtgagccatgattatgtcactgcactccagcctgggtgacagagcaagaccctgtctcaaaaaggcagattcggccgggtgcggtggctcacgcctggaatcccagcacttcgggaggccgaggtgggcggatcaccaggtcaggagatcgagaccatcctggctaacacggtgaaaccccgtctctactaaaaataaaaaaatcagccgggcgtggtggtgggcgcctgtagtcccagctacttgggaggctgagacaggagaatggcgtgaacccgggaggtggagcttgcagcgagccgagattctgccactgcactccagcctgggtgacagagcgagactccgtctcaaaaaaaaaaaaaaaaaatgctgattcataggccctccagggggctcgggctccagaaaggctgggggtcttggtcagcatcctaggtgtcccctgatcaccgccagaggtcccatgagtgtgagctgggactccgaggaggcttggtttctcctacccccttccccgagctggagccggaagcccagtggcccctctgggccggaagcagactggaggctcagatttgcaaacctgagaacagaggtcccgggagcaatgaggtgggcctgagaccctcgctcagaggtggctgcttctcgatctgcaggatctgagggccttggcggccagcagggacgtggccaggagctggcctcggctttggggactcaaggtctttgctgtcatagctttttggtagctacataaaaatggtgctgttcacacaaaccaatctccctggaggtgcttttaaggactgatgagagccacacgccctgattaccatttcatttaccggcgaacctgccttacctttgcgacagagaggacatcaggaaggtgacttttattgaggtgaaattcacacgatgcaaaagtaaccattttaaagtaaacttaatgacctgcgtcagcctcactcccattccctgccccagccctgacgctacgcaaccactttcttcttttatttatttatttatttattttttgagacagagtctttctctgtaacccaggctggagtgcagtggcacgatctcagctcactgcaacctccaccttccggattcaagcaattctcctgcctcagcctcccgagtagctgggactacaggtgcccgccaccacacccggctattttgtatctttagtagagacggggtttcaccgtgttggccaggctggtctccaacgcctgacctcaagttatccacccaccttggcctcctgaagtgttgagattacaggcgtgagccacctcacccagccgagcagtttttaatttttggaaaatgtgtacctccactgtgagaggcgtctgtgtgtgcgtgttgtggtttgagtgccctgaattagttaaaggcactccttcttctctgcggttccctgcagacctgaccgtctgtgattctgcagatgtcagggctgtacagaagagggtggaggccgggccagccccagctcctgctcacacagggaattagtgtcagagctgggctggggtcgagaggtgggctgctgggacatccgccctttcacccccatgctgactccaacatcagattgctgtcagcctggctgtccgaaaaagaacggacctggggccgggcgcagtggctcacgcctgtaatcccagctactcaaaaggctgaggcagaagaatcgcttgaaccagggaggcggaggttgcagtgagccgacatcgtgccactgcattccagccggggtgacagagtgagaccccatctcaaaaaagaaaaagaaaaaaaaaaagggccgggcgcagtggctcatgcctgtaatcccagcactttgggaggccaagaccggctgatcacgaggtcaggagatcgaggccatcctggctaacacagtaaaacctcgtccctactaaaaataaaaaaaattagccaggcgtggtcgagggcacctgtagtcccagctactcgggaggctgaggcagaatggtgtgaacccaggaggcggagcttgcagtgagccgagatcgtgccactgcactctagcctgggcgacagagcgagactccgtctcaaaacaaacaaacaaacaaacaaaaagactgggcacggtggctcaggcctgtaatcccagcactttgggaggccaaggctggcagatcacctgaggtcaggagtttgagaccagcctggccaacccaattttttttctctactgaaaaaaaaaaaaaaaaaaatatatatatatatatataggaggctgaggcaggagaatcgcttgaatcaggaggcagaggttgtagtgagccgagattgtgccactgcactccatcgtgggcaagagagggagactctgtctcaaaaaaaacaaacctagaaaaattagctgggcatggtggtgggcacctgtaatcccagctacttgggaggctgaggcaggataatcacttgaaccagggaggcggaggttgcagtgagctgagatcgcgccactgcactccagcctgggcgacagagtgagactccatctcaaaaaaaaaaaaaaaaaaaaaaagacgtacctgctcttctcgccaattaggacaggacatcgggaacctagaaaatttgaccaacacggaaaagcaccccaaaccaaaccacacagcaacagcaaaactcagactcttagcacctccacccagaaccagtactgtttatacgattccagtcacgacccggcatgtgtcgggtgtggacgcatacgcatgcacctgcttttctcaaagagtgatgttttagctgctaatttgtacctatttatcacttaacactgcattaatatcactgctcttttcccatgtaaactagtcttctgggacagaatttgtttttatttttattacaaaaattttttttgagacagaggctctatcgtccaggctggaatgcagtggcatgatcgcatctcactgcaacctctgtctcccaggttcaaacgattctcctacctcagcctcccgagtagctgggattacaggtgcataccacccccccactaatttttgtacatttactagagacaaggtttcaccatgttggacaggctggtctcgaactcctgacctcaggtgatccacgcaccttggcctcccaaagggctgggattacaggcatgaactaccgtgcccagccttatttttactttcagagatgggagtctcactgtgttgcccaggttggcctcaaactcccgggctcaagtgatcctcctgcctcggcttcccaaagtgctgggattacaggcgtgagtcactgcgcccggccctgaagtttttttttttttttttttttgagacggagtcttgctcttttgcccaggctggagtgcagtggtgcgatctcggctcactgcaagctccacctcctgggtttacgccattctcctgcctcagcctcccgagtagctgggactacaggcgtccgccaccgtgcccagctaattttttgtatttttagtagagatggggtttcatcgtgttagccaggatgagtctcgatctcctgacctcgtgatccacccgcctcggcctcccgaagtgctgggattacaggcatgagccaccgcgcctggcctggccctgagtttttaatctttggcttctcgcaaggtgctgcttccttttaccttctagaatgttctccgccacaaaaaagattaaagtctccaacaacaaaacaaaacaaaaaacacttccaaactgcaactcattgagagatggcagaggcttgtttcagattccagttgggaaggggaggtagggtgggtgcttctccgagaaagcccctggtgtgggggaggtgggctgaggttggagagggggtacccacagcggccaggtgggaagaagcctgcctgggagccgaggtctccacgtggccgccatggactgggggtcactctgcgcctgagatgtcttcagagactccagctataaaaagctgtgtggggctgggcgtggtggctcacagccacctgtaatcctggaactttgggaggctgaggtgggcggatcatgaggtcaggagtttgagaccatcctggccaacatgctgaaaccctttctctactaaaaatacaaaaaatagccgggcacggtggctcacgcctgtaatcccagccctttgggaggccgagatgggcagatcacctgaggtcaggagttcgggaccagcctgaccaacatggaaaaaccccgtctctactaaaaatacaaaattggccgggtgcggtggctcacacctgtaatcccagcactttgggaggctgaggtgggcggatcacgaggtcaggagttcgagaccatcctcgccaacatggtgaaaccctgtctctacaaaaaatacaaaaaatggctgggcgcagtggctcacacctgtaaccccagcactttgggaggccgaggcaggtgggtcaagaggtcaggagatcgagaccatcctggctaacacggtgaaaccctgtctctactaaaaatacaaaaaattagccgggcgtggtggtgggcagctgtagtcccagctactcgggagcctgaggcaggagaatggcgtgaacctgggaggcggagcttacagtgagctgagatagcgccactgcactccagcctgggcgacagagcgactccatctcaaaaaaacaaaaaaaaacaaaaaaaaacagctgtgtggattcctccggggcacgctgggcctccggagtctggagtgggggctaggggctgcctggggaggggctggaagggaagcagcagacaatgggctgggctgcacccctcccccggttccagttccccccaaatcagacggacacggctgcagaaagctgcggcctctcacgcggccaggcgcggggcgcacaatgcttgctgtcgtcccgtgttttctgctgtccccgcctccgttgtctgggtcccctggggcagctgtggaaattgggggttgagagcccttccaggcaggctatctttgtggctgtttcaagcatcctttgggagacagtaggggacaccttcccttccgccctctggacgaggcaggggtgacagcgtcggtgcgtgtactgggctctcgggaaggaggagggggcccggctcctggtcccttgtcccttgtccctgctcagtcctggttgcaggcattgtgggcaccacccgtgctgcccacaggaagatcattgtccgtagcagcatcctgagctgtgacctgcgtttatttccccatggggacgtggggtctccctgatgtcaagagaggcggtgtcacacaggcatttaacatgccactgccatgattgggactgggattgggaccagcacagccccttgggggatgtggcggtgtggtgggagaggggcttgggaacccaccagcagcctagccctggaagctgcgtgttgtagattatggaaaatgctgcagcactcagaacgagacatctgaaaatggtgttgaaagaaaacaaggacctgtcacttctgtgaatgtccccagcaaggactctcaggctatgatgagttggtttttttttttttttttttttttgagatggaatcttgctctgtcgccgtggctggagtgcagtggtgcaatctcggctcatcgcaacctctgcctctcgggttcaagtgattctcccacctcatcctcctgagtagctggaattacaggcacctgccaccacgcccagctaatttttatatttttagtagaaacagggtttcaccatcttggccaggctggtctcgaactcctgacctaaagtgatccaccgatctcagcctcccaaagtgctgggattacaggcgtgagccaccatgcctggcccagcagtgatgagttttaaagaatatacaggttattttgtttttattatttatttatttattattattttttttttagatggagtctcactctgtcacccaggccggaatgcagtggcacgatcttggctcactgcaacctccaacttctaggttcaagtgattctcctgcctcagcctcccgagtagctgggattacaggcacccgccaccacacccagctaattttttgtatttttagtagagacggggtttcactgtgttagccaggatggtctcggtctcctgacctcgtgatctgcctgcctcagcctcccaaagtgctgggattacaggtgtgagccaccacgcccagcctcaaaaaaaaatttttcaaattaaatttaaaaaaaaacaaacccagtctgggcacggtggctcacacctataatcctagtagtttgggaagctgaggcaggtggatcacttgaggtcaggagtttgagaccagcctgggcaacacagaaaaaccccatctctacaaaaaagaaaacatgagctgggtgtgatggtccacgcctctaatcccagctacttggtaggctgacgtgggaggatcacttgagcccaggaggttgaggctgcagtgagccatgattttgccactgcactccagcctaggcaacggagcaagactctgcctgaaaaaaaaaaaggatttgtctgtgtctacgcgcgtgtgtgttttgctcttgttgcccaggctggagtgcagtggcgcaatctcggctcactgcaacctccggctcccaagttcaagtgattttcctgcctcagcctcctgagtagctgggattacagacatgcgccaccacgcccggtaatttttgtatttttagtacagacagggtttctccatgttggccagggtggtctggaactcccaacctcaggtgatccgcccacctcggcctcccaaagtgttgggattacaggggcatgagccacggtgcccagccacatttatgtatttattaaataaaatagctgggcaccgtggctcgtgcctgtaatcccggcactttgggaggcccagatcagcagcgctttgcacgttgtgcctgttggcctcggtttccccggtaaaacttgtgatggttgcatgaagcccagatccatgaataaaacacgaggtctggagttagtgcttcctctcctacagcgaatgcataatcagcccacaactgcggcgacgaggcgtccgaggcggccgcaccccagcagcgatcggtgattcatggctcgatctgctaattgcctctcgggccggcttcgggctgatgcgtttgacaaggcgaggaggctgagacgtgcattaggcactcagccgcccccgccgcccatggagggcgcgactgctgctccctcttgggggtgatccgtcatttcatccacgggggagttggggacctggggggcaagagagaggctggatgcctgggccctgtttgtaaacagcgttgatttctgagctgagatgtggcgaccaggcccggagcagggctgtattcacagtcgtcgaggggtctgccggccgtggccctgctatggaaccttgggtggggctggggaacaggacctcctgcctcacctcagacagcccctcctgggccaggcaccgtggctcacacctgtaatcccagcactttgggaggccgaggtgggtggatcacgaggtcaggagatcgagaccatcctggctaacacggtgaaaccccgcctctcctaaaaatacaaaaaattagccgggcgtggtggcgggcgcctgtagtcccagctactctggaggctgaggcaggagaatggcgtgaacccgggaggcggagcttgcagtgagccgagatcacgccactgcactccagcctgggggacagagcgagactccgtctcaaaaaaaaacaacaacaaaaaaagacaggccctcctgccaaggagaacgccagctgccggccgcagtcatttgtctgtcacttggatgcatgcagagcggggtctccggagggtggctggtgccggaacctgctgccacttacagggccctggtccccgtggatgctccagcttctccttagagctcccggctaagatggacccgcaagtgtgttttgttgttgttgctatttttggagacggagtttcactctgtcgcccaggatggagtgcggtggcgtgatcttggcccactgcaacctccatctcccgggttcaagcaattctcctgcctcagcgacctgagtagctgggattacaggcatgcgccgccaccgcacccagctaatttttgtattttttaatagagacggggtttcacctgttggccaggctggtctgaaactcctgacctcaggtgatctgcctgccttggcctcccaaagtgctgggattacaggcataatttttgtattttttagtagagatggggtttcaccatgttggccaggctggtctcgaactcctgacctcaggtgatctgcctgccttggcctcccaaagtgctgagattacaggcataatttttgtattttttagtagagatggggtttcaccatgttggccaggctggtctcgaactcctgacctcaggtgatgtgccagcctcggcctcccacactgttaggatcgcaggtggatcgcagagtcttgctctgttgctcaggctggagtgcagtggcaaaatcatggcttactgagccaccgcgcccggcttgtcccgtattcttattgctacgtccggcagcgctgtctggacaggcctaggacctgctatctccttgggtcaggctcaggcctctttgtccacttctgagctcctcctggcacgtactctgtggaatgaagcctggagcagctctaatttttttttttttttttttttttgagacggagtcttgctctgtcacccaggctggagttcagtggcgcagtctcagctcactgcaagctccgcctcccaggttcacgccattctcctgcctcagcctcccgagtagctgggattacaggcacccgccaccacacctggctaattttttgtatttttttagtagagacggggtttcaccatgttagccaggatggtctcaatctcctgatctcgtgatccaccctcctcggcctcccaaagtgctgggattataggcgtgtgccaccgcacccggccctggagcagctcttgaggtgtgttggccccttgggcccactggccctgggtcaccttgggtgtccacccacagtggtgcagcaggaggccattctcagcaagacccgctctcatcccagcgtcgctcaacagctgctgagaacgccctctgctcccggtgggagaaggggctggtggcacctgaggaccctggcccgagggagccctggagatgctgtgggttcccacatctagggatgctggtaaagctttgcacaggcctggcaaggaggaagcggactcctcaccctgccgggcactaggcaggtccccaaatagcatcagagaaacctgcttccccaaacgaacactgagtgaagccgtcatttgcccggaggtgaaaatgtaaatggtttcaaaatagatttggggccagcgtgggcgacagacacagacaggcacacacatgggctacccgggctggggtgcgatgacgccgttgcccctggttacagaaaggcaaccccccagctcagcacaggccgggggccaccacccaaacacggtcaccagcagcggcaggagggaagcaaggagaccaccttttcccggggccaggagaccaggtcatgcctccaaaggctccagcttgggctacctgtgccattagcgagtgcctctcagctgccccccgggagtcagcaggctgactgccccacggcggaggaatggcggggctgtttaaagcactctgtggaacttttcttcttcttcctattattatttatttattttatttttcagatgaagtctcgctccgtcgcccagaccggagtgcagtggcgggatcttggctcactgcaacctccacctcctgggttcgagcaattctcctgcttcagcctcccaagtagctgggattacaggcgcgcgccaccacacccatctaatttttgtgtttttagtagagacgggtttcaccatgttggccaggctggtctcgaactcctgacgtcaagtgatccgcccacctcggcctcccaaagtgctgggagtacaggcgtgagacaccggacctggcccttcttctttctattattaatagactttatcttatttttattatttatttattattttccttttctttttgagacagggtctcactctgtcacccaggctggagtacagtagaacaatcttggctcactgcaacctcgacctcctggggctcaagtgatcctccagtctcagcctcccgagtagctgggattacaggcgcctgacaccacacctggctaatttttgtgtttttagtagagatggggtttcgccatgttggccaggctagtctcgaactcctgagctcaggcgatccacccacctcggcctcccaaagtgctgggattccaggcatgcactattatgactggttactttgactttttcttaaaaatggggtctcaccatattgcccaggctagactcaaattcctgggcttgaccgtggttggtgactttcgcctttaatgtgaacactttgggaggcagaggtgggaagagtgcttgaggccaggagttcaagaacagcctgggtaacattgtgagaccccccatctcaatttttattaaaaagaaggaaaacaaaaaaattaaaaaactcctaggctcaagtgatcctcctgcctcggcctccctggtagaatagattttttaaacaatttttgggccaggcaccgtggctcacgcctgtaatcccaacactttgggaagctgaggcgggtggatcacctgaggtcaggagcttgagaccagcctggccgacatggtgaaatcccgtctccactaaaaatacaaaaattagctgtgcgtggtggtgcatgcctgtagtcccagctattcaggaggctgaggcagcagaatcacttgaacccaggaggcgcagattgcagtgagccgagatcgcgccattgcactccagcctgggcaacagagcgagacagggcctcactctgtcccccaggctagagtgcggtggcacgatctcggctcactacagcctcgactccggcctccgtctcctgagtagctgggactacaggcgcccaccaccatggccagctaattttttccattttttaaggagccaagtctcactatgttgcctgggctgagcccgaactccggggctcaagcaatccgcccacttcagcctcccaaagtgctgggattacaggtgtgagccaccaccccagccggtttctcccttttagaaaatttaccactaggagccaaaatattttttcccaagctcgttagccctttgacttctgttaccatcctcctcatcttttccgaacgaccacttctcttgtcatgagctgacacagctctctgggatggggttattaagccctttccagcaaaaactgcaagtatgtttcccagctgggagggtgctaaggcatgtgttactctggtcctgctcctgtgatacattgtctcccaactccggagaaggaggtcagggtttcagttcctgggtctgtttctagggatgccaggtgggagtatggttttagaaaagcaacttggggccgggtgcggtggcccacacctgtaatcccagcattttgggaggctgaggagggtggatcacctgaggtcaggagttcaagaccagcctggccaacatagtaaaaccccgtctctactaaaaatacaaatattagctgggcgtggtggtgggcacctgaagtcccaagtactcgggacgctgagacaggagaatcacttgaacccaggaggttcatcccaggaggttacagagctcagatcgtgccactgcactccagcctgggcaacagagcgagactctgtctcaaaaaagctgggtgcggtggctcacacctgtaatccgagcactttggcaggctgaggccggcagatcacgagatcaggagttcaagaccagcctggccaacatggtgaaaccatgtctctactaaaaatgcaaaaattagtggggcgtggtggtgggtgcctgtaatcccaactactcaggaggctgaggcaggagaatcgcttgaacccaggaggcggaggttgcagtgagccatgatcatgccattgcactccagcctgggtgacagagcaagactccatctcaaaaaaaaaaaaaaaaaagcaaagatggggaaaattggggacgtcgcctatcccgacccctgtgcctgacacgcagcccgtcacagggcgtgggaagcacggggcagttgcggggaccgccgtgttctcagccacccacccagggcccccagcatctctccagcgtctcctccatttgagttcaaacatgggccctttctacaatcagctttgtttgtgtggtgtttggaattgccatcctggaggccctgggtactgttgtgattcctaggctggtttcctggggctccgtgtggtgggggcctctggccaagctgctgtaacaaagaccacaaacctggtagcttgcaacggcacacagtcaccatctcacagtctgcagggcaaggtctcgctctgtcacccagacttgggtgcagtggtacagtcgtggctcactgcagcctccaccccctgggctgaagtgatcctcccacctcagcctcccagagtgccaggaccacaggtgtgagccaccaccatggctggcccaaatcaccccttatttatttatttatttatttaggagacggagtcttgctctgccacccaagctagagtgcagtggtgcaatctgggctcactgctacctccgctccccaggttcaagcaattctactgcctcagcctcccgagtagctgggattataggtgcccaccaccacgcctaactttagtatttttagtagaaatgtggtttcacatgttggccaggctggtctcaaactcctgacctcaggtgatccgcccaccttggcctcccaaagtgctggcattacaggtatgagccaccacgcccggccaaatttcccatctttataaagaaaccaggcatattggatcaggatccactgtactcccgaatgacctcgtgttaactgattacatctgcagagaccctatttccaggtaaggtcctggggttacaactgcagtctgtggatgatttgtgggggacgtggttccaccctagtgcctgccacctgccatctctctgggggtttgatgcccttggggtgcctggcacctcactctcagctgctgccaaagcccttcttgagctcgtcaaggtcaccctggattctaatcccaacccccaggcacttcttggcaccaggaacattttctgcaggtggcctgcgaaggagctgggagctgtgctcaaatgcttcctcctaacaagccttccgtcctggggactggcactgtgttgagacgggagagactccaggtccgcagagggcaccgtcctgcctggaggttcaggactgccaccattcatctccgtgaggagctggagcaggcgtcctgcctttctgtgtcctctaccctggttttgaatagaaggcatcctggctgggcagggttcttcagggagcaggtgatccggcattcagccagattcttgaaaaccccctgggccgggcacggtggctcccgcctgtcatcccaatactttgggaggctgaggcggggagatcacctgaggtcaggagttcgagaccagcctggccactgtggtgaaaccccgtctctggtaaaaatacaaaaattagccgggcatggtggtgcgtgcctgtaatctaagatactctggaggctgaggcaggagaatcgcttgaactgggaggcagaggttgcagtgagccaagatcgtgccactacactccagcctgggcgacagagcgaaactctgtctcaaaaacaaaaacaaggaaaacactccagcccccacaccagcacggggactgcagcgcccgcgagacttgggtcacggtgactcctggaggctttgcacgttaagccgccgcctgcccagggacactgtggtcaccttcccccgccggagccctgcgtacctctcctgtctgtgctttgagagaggagtttttttcccgttgcttctggaaccctgggttgtcctgcagaataggacaccctccttcattacgatagaggatgcagagccgctccctggcaggtgttcccagtcccagcaggggtttccagagacacagggtgcggagggattctccaccaggagatggttccagatgcgtaagcccgtcccctctgcaaggccctgtccccaaagagcttgggcctgtgggtcccacagctcctgcgagtgaccaccaccgtccagggccccccaagctgttcactcacgggtctgggtggaggcagacatcctgggaggaaccccaggggtgtggccgaggctgcacagaggcctctccacgcctcctggagggatgggagttagtctcggctggagtggagggtggggaacccagagtcaggagcacccagagtccaggtgggaaacgcctgaggcaggggccctgcttccacccctgctgcaggggacactcagggtcctccacctgggagtggccacgctggtggccctttgcggccctgcacattacagccctgccagctttggggagagctgacatctcaaggaagtcctttttaaaaaattttatttagccgggcgcgggggtgcacgcctgtaatcccggcactttgggaggccgaggtgggcggatcacaaggtcaggagttccagaccatcctggttaacacggtgaaaccccgtctctactaaaaatataaaaaattagctgggcgtggtggcgggcacctgtagtcccagctactcaggaggctgaggcagaatagcatgaacccggaaggtggagcttgcagtgagccgagatcgtgccactgcactccagcctgggctacagagcaagactccatctcaaaaaaaaaaaaaaaaaaaaaaaaaaattatttaatggctcacgcctgtaatcccagctctttgggaggctgaggcaggtggatcacgtggtcaggagatcaagaccatcctggccaacatggtgaaaccccatctctactacaaatacaaaattagctgggcgcggtggtgtgtccctgtagtcccagctactcgggaggctgagacatgagaatcgcttgaacttgggaggcagaggttgcaatgagccaagatcacaccactgcactccagcctgggtgacagagcaagactccaacacacacacacaaaaaatttatttaaaatgttttattaggctttccctatgttgccccggttggtcttgaactcccgggctcaagcaatcctcttgcctcagcctcccaaagccttgggattacaggtgtgagtcactatgcctggcttttgaaacatgttttaaggtattttaaaacttttaattctgaaataattgtagaatcacagaaaggtgtaaagaaacatagaggggctgggcgcggtggctcacgcctgtaatcccagcactttgggaggctgaggcgggtggatcacgaggtcaggagttcgagaccatcctggctaacacggtgaaaccccttctctactaaaaatgcaaaaattagccaggcatggtggtgggagccagtaatcccccctacttgggaggttgaggcaggagaattgcttcaacccaggaagcagaggctgcagtgagccaagatcgcgccattacactccagcctgtgcaacagagcgagatcctctctgaaaaaaataaaatatgccgggcgcagtggctcacgactgtaatcccagcacttttgagaggccaaggcacgtggattgcctgaggtcaggagttcaagaccatcccggccaacatggtgaaacccagtctctactaaaaatacaaaaaaaattatcctgcgtggtgatgtgggcacctgtaatcctggctactcatgaggctgaggcaggagaatcacttgaacccaggaggcggaggctgcagtgagccaagatcgcaccattgcattccatcctgggcaacaagagggaaactcccatctcaataataataataataaaataagataaaaatgcaaaaatcagccggatgtgctagtgggtgcctgtaatctcagctgcttgggaggctgaggcgggacaattgcttgaacccaggaggcagaggttgcagtgagctgagattgcaccattgcactccagccagggtgacagagcaagactccatctaaaaaaaaaaaaaaaaggagctctcaagccaggaaaagacatggagaaactgtaaatgcatgtgaccacgtgaaacaagtccgtctgaaaagcctccgtgctgcaggattccagctttaggacgttctggaaaaaggctaaactacagaaacagtaaaaagatcagaggctgccaggggccggcagagggagggatgaacaggcagagcacaggatttctagggcagtgaagctattcgatctgagagtgcaagaacatgatacctttatcaaatccatagaacaaggccaggcatggtggctcacgcctgtaatcccagcactttgggaggccaaggtgggtggatcacctgaagtcaggagttcaagaccagcctgaacaacatggtgaaatcccatctctactgaaaatacaaaaaaaaaattagccgggtatagtggtggtcacctgtagtcccagctacctggggggctgagggaggagaatcacttgaacccaagaggtagaggctgcagtgaccgacatcgcaccactgcactccagcctggccgacagagcaggaccctgcttcaagaaaaaaaaaaaaaaaaaaagccaggtgtcgtggctcacgcctgtaatcccagcactttgggaagccgaggcgggcagttcacctgaggtcgggagttcgagaccggcctgaccatcatgctgaaactcgtctctactaaaaatacaaaattagctggaagtgctgtcaggcacctgtaatcccagctactcgggaggcggaggcaggagaattgcttgaactcaggaggtggaggttgcattgagccaagattgcaccactgcactccagcctgggtgccagagtgagaccccatctccaaaagaaaagaaaaaaataattattttttttctgggtgtggaggtgtgcacctgtggtcccagctactcgggaggctgaggtgggaggatcgcttgagcccagaaggtcaaggctgcagtgagctgtgatcatgccaccacactccagcctgagccacagacagagtgagaccctgtctcaaaataaataaataaaataaaaataaataaagttccctcaaatccactttgcaatggacgcatttagagtgtcatgtttgcacaaatgtggtcacctgccacagtgggcgagatgaagaccacagccaatataattacggtacagacaattgtgaaagcaaaaagagggggaaggaagcccaggtttgatttctagctggggtccaaccctgaagtgggtgaggtaaagccagatcctgtgcacacactgctatgggcgctgctgggccttcttcctggagtttttgtcggcctggagtgggagccaaggctcttggggacttaaaaaggcaagatccagctgggcatgatggctcacgcctataatcccatcactttgtgaagctgaggcagggggatcacctgaggtcaggagatcgagaccagcctggccaacatggtgaaatcccatctctactaaaaatataaatgttagccatgcatggtggcgggtgctgataatcccaggtactcgggaggctgaggcaggagaatcgcttgaacctgggagtcggaggttgcggtgagcggagatcacatcactgcactccagcctgggcgacagagtgagactccgtctcaaaaaaaaaaaaaaaaaaaaaaaaccctgcaagatctgcatttgaggtcagagtgtctgggggtagaaactgaaacagagttgggggtgaccctgagacagggtctgggttctctgtggcaggtgcagcagtcacccagtctcaggggggagatgggaggatggggaggttgtctgcgaattgcaggctgtgtctgcgtgcgagagtttcagacaaagaaggaagttattggctgagaacaatgtaagattatatgatgtaggaccttgaagaaaacaaataaaagacagttgtagattacccacgtctgggagaagaacaaggaaagagaaagaagagagaaaacaaatcctcaaatggcagcgctttttttttttttgaaatggagatgacaccttacagcctgccctgaaatgcctaacagctaaaatgaaaggctttttttttttttttgagacggattctcactctgttgcccaggctggagtgcaatggtgcgatctcagctcactgtgacctccgcctcccaggttcaagcgattctcctgcctcagcctcccaagtagctgggattacaggcatgtgccaccatgcctggctaattttttgtgtttttagtagagacggagtttctccatgttggtcaggctggtctcaaactcccaaccttaggtgattctcccgccttggcctcccaaagtgctgggattacaggcgtgagccagtgtgcccggcctatgactttggtttttgttgtttgttgtttgtttgtttgagacagagtctccttcttgttgcccaggctagagtgcaatggcaccgtcttggctcactgcaacctccgcctcctgggttcaaacaattctcctgtctcagcctcccgagtagctgggactacaggcacatgtcaccatgcctggctaatttttgtatttttggtagagacagggtttcatcacgttggccaggctggtctcgaatccctgatctcaggtgatctgcctgtctcagcctcacaaagggctgggattacaggcatgagcaatgatgcctggccctcactgctaaattaaaaaaattttttggagagacagggcctggctatgttgcccaggctggtctcaaactcctgggctcaagcgatcctcccgcctcagcctcccaagtagtttgggattacaggtgtgtgccaccatgcccagctaattttttttttttttttttttttgagagagtctcacgctgtcacccaggttgcagcccagtatcgtgatctcggctcactgaaacctccacctccctggttcaagtgattttcctgcctcagcctcccgagtagctgggactacaggcatgcaccaccgcacccagctaatttttgtattttagtagagacggggtttcaccatgttagtcagacgggtctcgaactcctgacctcagatgatctgcctgcctcagcctcccaaactgctgggattacaggcgtgagcccctgggcccagctgaccagctaattttttttttttgagacagagtctcgctctgtcgcctaggctggagtgcagtggcacaatctcggctcactgcaagctccgcctcctgggttcacgctttctccttcctcagcctccccagtagctgggactacaggtgcgcagcaccacgccctgctaattctttgtgtttttagtagagacggggtttcaccgtgttagccaggatggtctggatctcctgaccttgtgatccgcccacctcggcctcccaaagtgctgagattacaggcttgagccacagtgcccggcctcgctaatgttttaatgttttctagagacgggtctctggtcatgtggcccaagctggtgtcaaactcctggcctcaaaagctcctcccacctctgcccccgagagcactgggattacaggcatgagctactgtgcacagctctaatctcttcttttataacgacaccagtcacaatggattagagcccagacatatgacattttaccttaatctcctcttttttttttttttttgtttttgttttttgagatggagtttcgctctttttgcccaggctggagtgcaatggtgtgatctcggctcactgcaacctctgcctcccgggttcaagcgattctcctgcctcagcttcccgagtggttgggattataggcatgcaccaccacgcccagctaattttttgtatctttagtagagacgggatttcaccacgttggccgggctggtcttgaactcctgaccttgtgatccaccctcctcggtctcccaaagtgctgggattacaggcgtgagccaccgagcctggcctaaagaaagtggtttaatcgacttacagttccacgtggctggggaggcctcacaatcatggcagaaggtgaaagacccatctcacatggcagcaggcaagagaagggagcttgtgcagggaaacttggaggctgaggcaggtgggtcacttgaggccaggagtttgagaccagcctgtccaacatggtgaaaccctggctgtactaaaaatacaaaaaattagccaggtgtggtggcggatgcctgtaatcccagctacttgggaggctgaggcaggagaatcacttgaacccaggtggcagaggttgcagcgagccgagattgcaccaccacactgtagtctgggggacagagcgagactctgtctcaaaaataaaatataaccatcagctcttgtgagagttattcactatcaagagaacagcacgggaaagacctgttcccatgattcactcgcctcccacaaggtccctcccacaacacggaatcgtgggagctacaagatgaggtttgggccgggcgcggtggctcatgcctgtaatcccagcactttgggaggccaaggccggcagatcacgaggtcagaagatcaagaccatcctggctaacgtggtgaaaccctgtctctactaaacatacaaaaaaaaaaaaaaaaaattagccgggcgtggtggcgggcgcctgtagtcccagctactcaggaggctgaggcaggagaatggtgtgaacccgggaggcggagcttgcagtgagctgagatcccgccactgcactccagcctgggcgaaggagcgagactcggtctcaaaaaaaaaaaaaaaaaaaaggtgaggtttggatggggacacagagccagactctatcaaaggtcttaaaattcttttcacttgggtttgtttgtttcacaataacagaagtaatacaagccccaggtaagcagtcaaacaaagctaagaaacaggatggaaaagacactgatcctgtccttattccaggacggccccaggctcctcaacgcctcccacccgtgttggtagagacagggtttcaccatgttggccaggctggtctcaaactcctggcctcaagtgatccacctgcctcagcctctgaaagtgctgggattagaggtgtgagccaccatgcttggccccaaaatcgccttaatattcatcccttatggggacacagacacatactgcacatctgctgggtgccagccagggtccagcaagtcctgcctgtctctgcctcaattttcttttttctttttttttttttttgagatggaggtttgctcttgttgcccaggctggagtgcaatggcatgatctcggctcactgcaacctccacctcccaagttcaagcgatgattctcccgcctcagcctcctgagtagctgggattacaggcacccaccaccacgcccagctgatttttgtatttttagtagagacagggtttcaccatgttggccaggctggtctcgaactcctgacctcaggcgatccacccgccttggcctcccaaagtgctgggattacaggtgtgagccaccgcgcccagcctctgcctcaattttctttgagtcagtgtctcgctctggcacccaggctggtgtgcagtggcgcaatcatagctcactgcagcctcgaactcctgtattcaaatgatccttatgcctcagcctcctgagtagctgggaccacaggtgcgtgcaccaccacacctggctaattttgttatttttttgtagagatgggggtctcactatgttgcccaggctggtcttgaactcctgagctcaagggatctgcctgcttcagcctcatgagtagctggacatgcatttccatcttgctctgtgttagctgggggaggccagctcctgaaagcccttgcccttcccaaaatgctgggggacgtcctgacccccccatttgtccttcctgtgtctctctggctatctgtctgtgtcttcacctctctgggtccccaccttccacagcccctctccggtgacccccaaactgcagctgtattctcctgcagaggagttcggcggtctctttgtgggtcgtttttatctcatgccctcaggcctccctcacgtgcccctggccctaattaaggtattttcctaaacaagcccagttgcgtctcttaaaatgaattctggtgccagctggtaaaattaatttttttctcatcctctacaatgcaagaatgaatgacacacggtcgcttgtccacaggaggccggcgtcctgcggaaggacaagcgtgtagaccagtaattacgttccagtgtggaaagtgtcccacatgagtgcggcggagcgaggtagccctgaaataaggggcatccccacggtgcagctactagacatggctaaggttgatttcacactcaccctcgctggaccgtgttggatagtgtcagccaaaatatatgtctccctagaacctcagaatgtgaccttccttggaagtagagtctccacagacataattagttaagatgagattgtggcagggctcagtggctcacttctgtaatcccagcactttgggaggttgaggcgggcggatcacctgaggtcaggagtttgagaccagcctggccaacatggcgaaacctcgtctctactaaaaatacaaaaaaattagccgggcgtggtgccgcgtgcctgtagtgccagctactcaggaggctgaggcaggagaatctcttgaacctgggaggcgaaggttgcagtgagccgagatctcactacttcactccagcctgggcgagtgaagtagtgaagaggctgtctcaaaaaaaaaaaaaaaaaaaagataaggttgtattggagaagggtgtgctctaatctaatgagatgtccttataagaggaagaggcatggaccacacactttgggaggtcgaaggtggaggatcgcttgaggtcagaagctcgagaccagcctgggcaacagagcaagactgtgtctctacagaaaatttctttttcttttctttttttttttttttgagacagagtctcagtctgttgcccaggctggagtgcagtggcgtgatcttggctcaccgcaacctctgcctcccaggttcacgccattctcctgcctcagcctccccagtagctgggactaccagcgcctgccaccatgcctggctaatttttttgtatttttagtagaaacgggggtttcaccatgttagtcaggctggtctcaaactcctgacctcaggtgatccaccgcctcagcctcccaaagtgctgggattacagatgtgagccactgtgcccagccacttttcttttttcttttttttttttttgagttgaggtctcattctgctgcccaggctggagtgtagtggcaccatctcggctcgctgcaatctctgcctcctggattcaaacaattctcctgcctcagcctcccaagcagctaggattacaggcacctgccaccacgcctggctaatttttgtatttttagtagagacgaggtttcaccatgttggccaggctggtcttgaactcctgacctcgtgatccgcccaccttggcctcccaaagtgctggaattacaggcgtgagccaccgcacccggctggccttttttttttttttttttttgtagcaacagggtctccctgtatagcccatgcctgagtgcagtggagcgatatcggctcactgcagcctcgaccttctgggctcaagtcatcctggtctccccaagacaatcctgacttccgtggagcccctgggtctccagaaacaccagtgacagccctctctcttgtgttctgaatttcctatgtaaaaacctggcttgtgtgaagggggctggtaattggacatctgtaaagctccttggcagtggggccccgtcaaagctggcagtcgtagctccgtgttaacaaggtcaaggtctggtcaaggtttccagtgtggtccccttatggcctaattagggacttgaatgggttggaacactgattgagtttcagttcagaggctattttgatgttacagttcaatcactttagaaaatatagattcagttctggttcaggctggaacactaggtgtgtgtctgtgtgttttaatctttgatttagttcatggttcagtatcaaacttaatacatttttcacccatcatcagattaacaaagatgagagaaataatcacgcccggccctcgtgcagggtgttagatgggccgtggtaatgcggggctgccgccaatgtgaattggtacctttctgaaaagcaacttgacgtcatctgtcaaacgccttgaggatgtccagaccctcagacccagcaatttccgcctccagggatttatcataaggatataatcagaggtgcaccaagatttacataggagagttgctttctgcggccttatttaaatcatggaaaaatcaggaatcgctgaaatgtctcacaatagcggtctggttaataaaaatacgatagcgaccgttgtcttacaacgccttgagtagcagagggaattgtgtatgatacatttcccgcagaaggggaaacgttttaattaaagccataactgacgtggagccggaagaagcctgtgaaaggacgttcttgcatcgacctgccaggcctttgtgctgccttagaagcagccgctttattgcaactgtgaatctctatggtttaggagagaaattcattctttaaacaaaatttgagtgagcgctcggtgacacggactgggcttacaatggtgaagaaaacaggactcagggaactcacagacgaatggagaagacatttaataaaataagacctaacatttcaccactggcacaagtactttaaaagcattaatttatttaataccagagccagaggccaggcacggtggctcacgcctgtcatcctagcgtttttgggaggtcgaggtgggtggattatgaggtcaggagttcgagaccagcctggccaacatggtgaaaccgtctctactaaaaatacaaaaagtaggcgggtgtggtggcgtgtgcctgtaatcccagctactggggaggctgaggcaggagaatggcttgaacctgggaggtataggttgcagcgagccgagattgcaccagtgcactccagcctgggcaacaagagcaagactctgtctctaaaacaaattaaaaaaatatacctcatttgagctcataggagctttgaactcctgggctcaaggaatcctcccatcttggcctcccaaagtgttgggattacaggcgtgagctgttgccacgctgtgttttgttttgttttgtttttgagacagggtcttgctttgtcatgtggagtgcagtggtgcaatcacggttcactgcagcctcgacctcccagactcacgcaatcctcctgcctcagcctcctgggtagctgggactacaggtgtgcatcaccatgcctggctaattcttttttgtttttgtacaggcagggtctcactatgttgcccaggcctgtctccaactcctgggctcatgtgatcctcccatctcagcctcccaaagcacctcccaaagcacaggcgggagccaccgcactgggccccactcctcctgaggcagaggcttggatctggcacagcaccccttctgctgtattccctgggctgaagcaggtcacacgccagcccaggattttttcttttttctttttgagacagagtcagtcttgctctgtcacccacattggagtacactgacgcgatctcagctcactgcaacctccgcctcctgggttcaagagattttcttgcctcagcctcccaaatagctgggattacaggtgcacactaccacgctcagccaatttttgtatttttagtagcgatgggggtttctctatattggccaggctggtctcgaactcctgacctcaggcgatatgtctgccttgacctcccaaagtgctgggattacaggcctgagccaccgccagctcagatttaacgtgagaggatatcagagacatagttcttgccaaccacccacagaccaccacccccattttatagacaaactgagacggctgagcaaggtggatcctacctgtgatcccagcactttggggagccgaggtgggaggatcacttgagcccaaaaggtcgaaaccagcctggccagcatagcaagaccctctctctacaaaaaataaaaatcttagccagccatggtggtgcgcactgtggtcccagctactccggaggctaaggtggaaggatcatttgagcctgggaggttgaggctgcagtgagctatgactgggccgctgcactccagcctgggccacagagccaaacttcgactcaaaaatgtaaataaaaataaaaaacaagtgaaaggtgaacattctcaacttgataaaggaaaaaaaatcagtcgctgaggttgctgggatcgaccgaagacacaaaccttctattcccgcaaatgtgagaaggaaaaagaagttagagccggctttgctgtcgccccttccccttgaagagtcggggccagtgcgtgacgaatgctgctgtaagtcttttaattttttccttttttgagacgaagtcccactctgttgcccaggctggagtgcagtggcgcgatctccccttactgcaagttccgcctcccgggttcaagcgattctcctgcctcagcctcctgaatagttgggattacaggcatcgccaccacgcccggctaatttttctatttgtagtaaagacggggtttcaccatgttggcaatgctggtctcgatctcctgacctcatgtgatctgcccgcctcggcctcctgctgggattacaggagtgagcctgtatcttttttatagagatggggtctcgccatgttgcccaggctggtctccaatccttgggcttaaaggatctgccaattcggcctcctttgcttttaaagaactgtgggggctggcgaggtggctcaggcctgtaatcccaatactttgggaggccgaggcaggccgatcacctgaggtcaggagcttgagagcagcctgatcaacatttagtattctctactaaaaatacaaaaattagccgggtggggtggcgcgcacctgtaatcccagcaggaggaggctgcagtgagctgagctcgcgccactgcactccagcctgggtgacagagcgagactccgtctgaaaaaaaatcaaaaaccgctcagggaaaggcctgacactgatggagcgaccgctccggggctcccgccacccgcggctgtttccggtgccccccggggtcttgggaccctcccaaggtgggtcctgctctagttcagaagcttatgacgcctttgcggggatgcctggctttgggatcggttgggatctgctggaattgggtccgtggcgcgcagctcccgggctgggaggtgccgtaggacctggaagattctcgaaagttctggaaggttctctcagggatcgccgcgggcgggggagcctgttttcccaccgagacccgcgagggcggtgtccggggtctgactgcaggacaaagggccgggagcgcgggagggcggcgcccgggagcggccacacatgccccgccaaccggtctcctcaggcagcactcccgggaaaaaggggtagacgcgcggcggaaggggcggggccggcgcgcggccgtggacgccggagagggcgaggccggcgctccttgggagcgcgcgcgtcccattgggcagcgggcggaagggggcggagcttggcgccgccgcgaggcaagccccgcccccggccccgcggggagcggcggcggcggcggcggcggcggtggcggaggcggtgagcgcgggcggcgcggacggcagcggttggcgggcgggtcctccgctgttgcggccgctgcggcctccttgcccgggcttggggcgccgcgctggggaaagccgggggcccggtgagcccgcgggatgcgtcccctcggttccgccgggcggggctgaggcgaggaggccgggcctggggggagggggggccccggcctagagactcctccgggagcgcccggtccctaccgccgtgggtcccccactctgcccggacccccttttccgcccctggcgccgtgggcccctcactttgcctggactccttttcccgtccctgccgcccggaccccatctcttgcttggacccgctcccccatccttgctgcctggacccctatctccttccctggatccccctcacgtctgccgtgaaccccatctcttgcctggacccccatctgcttccctggattccccacccccaaccgtgaaatcccccatccctgccacctggaccctccgctccacctcctccgtgagccctcgttcttgctccctgagcccccccgcttctgctgtgacccccttctctgttgcctgaatcccccgttcctgcaagccgcaacccttcctccgccatgaaatcttgtccctgctgcctggacccctacttctgctgctgctgtgatcccctctcttgctggaaacgccacccctacctctgctgggaacctcctcttccctgctgcggggacgcccccctccgttgttgctaaattccacccccacccccaaacctccttttcatttctgtcaacagccaagccagtccttcccattgatgctgtgaacggtctgcagctgtccccgttctttcagggacatggcagccaaaagagcagtcgtttttccgctcttatttttgtgtgtgtgctgtggtcaactgttaactccccaaattggggagggttgtgagctttgattgtgtaaaatgcctctcctgccgaggtcggaggcaggtcttccgcacggagatgatttattcaggagccttttaaaactgatctagatagaacctttgggagggactgtgctgtattttatttatgaaaaaatgcaggcgcctccctggataccgagccccgtcgtttctgtttgtcagtctgctttttggcattgagcatctcaatgcaagattgtggaattaaaccatctacttgaggctaagtcgagctaacctttgcccctgagggctgtgtctgcgttaacatcgccagcaaacagttgtataaaccaccgtgcaaatttcgttccaggacacattggcgtgagacctgggagtacgttgtgccaaatcattgccacttgccacatgagtgtaaatgatggcggatgccaagtatgtcctctgccgatgggaaaagcgattatggcctgcgaaggtgacagccattattctgtaacttcaggacttagaaatgactttcgggtgacaagtaaaatcttgatcaggagatacctaggatttgcttcagtgaaataattgagccagaacacggttggcactgattctcgttccccatttaatggggttttggtctagtgcttccaaggttacacttccagaaatgtcttttttttttcacactaaaaaaaaaaaaagaatcagctgtaaaaaggcatgtaaggctgtaactcaaggaaagatctggcaagcagccctgtgatagtaaattatggtcgtgttcagggaatgctttccagcaattcagtagacagtgctcagctgcaatgcaaaagcccaggtccttgtctttgtctgccactggcctctcatgcctcagtttccccatctgtgaaacaatggggattggaccaaatatctgaaatcccatggttataggccttcaggattacctgctgcatttgtgctaaagtttgccactgtttctcactgtcagctgttgtaataacaaggattttcttttgttttaaatgtaggttttggcccgaaccgcgacttcaacaaaaaataagagaagaaaggaatattttctagctgtgcaaatcctctctctagaggaaaagttaagtgttgtgttgttttaatactgttttttcccgtgtagatttctgatacttcaatcccctactcccccaaaacagttgaagcccagcccactcttaatgggcttattcaccatttgtgtaattcattaatgctcataataacctcatgagaaagcaactagtttgattttatgtcagtttggaagctgaagatccaaacgaggcattctgtgagatctatggagagattggtacaaacactgaatacatgtaaattatactcagggtagaccctatttgtggttaaaatagggatatttccttttttttttttttttttgactgtttcttaatcagtgccatgccaggaaaatagggatgtttccttcccagagatctgtgtgtcttttttcagaaacgtctgtgacaggcccatcaattttgaaatatttggtttttgagcctgtcactctaaaccagcgtttaacgttcaaaaggcaaataactgatgaccaggcggcacattgttctgctccgtgagtgtctggcactgggaaaggtgtagattgtctagaatgacagcaattccgacgccccagtcagtcctgcgtgattgtggcgagggcgcgtctggcaccgggaaggtgtagatcatctagaatgacggcgattccgacgccccggtcagtcctgcgtgattggcgagggtgcatctgtcgtgagaattcccagttctgaagagagcaaggagactgatcccgcgtagtccaaggcattggctcccctgttgctcttccttgtggagctccccctgccccactccctcctgcctgcatcttcagagctgcctctgaagctcgcttggtccctagctcacactttccctgcggctgggaaggtaattgaatactcgagtttaaaaggaaagcacatccttttaaaccaaaacacacctgctgggctgtaaacagcttttagtgacattaccatctactctgaaaatctaacaaaggagtgatttgtgcagttgaaagtaggatttgcttcataaaagtcacaatttgaattcatttttgcttttaaatccagccaaccttttctgtcttaaaaggaaaaaaaaaaaaaaaccattcaccagggttcttgctgcctgtaacctcaggcagatgaattcctagttggctgtgacttttggtttaagtggaaggttgaggaggaaaatgaaaataattcttttgttatctaaaggaaaacatgtttgaaaatgtcttggcggcgttggctggtggtgtgtaacgtcgattttgtctctgcagaattaaggtgaaaagcactgaagttgagatcctagagaagtctcaaattgaagccattgcttcctcgttaggtaagagcgtatttttaagtggccactaggttttcataaaataagaggtcatttgggagaatgtgaaggctcagctttctgggtaaaaattcaccctgttcaccatgtttttcttcatacaagggaacgcgaatcccctgagctgaaggagaaggaaaaatggatccgctttcttaaacctttccagaatttgcccctagaaccactcctattcttgacgcccagaatggtcagtggtgagcatcaaggtcatctcgtacccccgtggcctccagtacacaagacgaggaaggactttgctgccataaggggggaggtcctcctttttcctttcctcttcctatagtaagatttgctgtggtactgtcgctgcctggccagtctggtctcagcccaaggtttgagaagcagttggttgtgtgtttaaaattccagagcagagcccaagggagagaacgggtggcctggcactggggttggtggcacccattgtttgaggcactgtcatggggggcacgaggcaggtcggaagtggagctctcggcttcccatccatccgggtgcgctttctcccaggccttcagtttagcacccacctcctttgcacactgtgggtgagaaaagctttgcctgagtccagccggggactggtcatgcacatacatgacaagtgaggagcactggtgactgcctgccccctagccacagttgtgcaaacccaaacctgccagccttccttctcaaagtggaactgtttatcccatttgcaaataattgtttctcttgtgaaaagatggaccggaattccttccaatgatgtttataaaatcaggtctattttcctgtgtcttccgaaaaacagctcttgtttaaagcaggatccatctctgcataacttaggccgggctgaccatcatcttggatggcgtcgtccttgttggcgcagattgtgttggggggctggttgtttgtgggcgcctttaatattcaaaggggagaatactgttctgattgaggcattatgcccgctgagttgtgatattacatccatcatcttgttcaaataaatagcgccgtatctatatgtcggaatgaataaataaaagtgctgcagcagggaggttgggctggaaaccagaggcccacgatgctctttgctggctttgaaatgcccttgcaaagaagtattgaaaatttaccagcccacaatgagtcttttaaatctccttttccttgctaccaccaacccctgcaccaaccaagaatacgttgccagcagagttctttatttagttggcattggtttttattgaccctgattgaatttgaaattgtaaggctgagagaggatttgcaaaacatttgaatacattttgctcacggtattgttttgtaacttggaggaatttatctttttagccaatcaggttaaggtcaataaatttggtttttaaaaaaatgaagcctcgaatcccggaatgaatagctgtcgttctgtagcctcgtctcctttttgggaaaatgtaggtgagaaatgttagtcctccccttcagtgatttaggtatgaaactagccgtcagaatgagacaagcgagcttctaaagcgatgccgtgaccgcagtgcctgtgcagtgaacgtaaccggcattgtgtatgttcggtccttgcagcctcacagaatgaggttcctgcggcacccctggaagaactggcctacagacggtcgcttcgcgtggctctggacgttctgagcgagggctcgatttggagtcaagaaagctctgcagggacaggtagagctgaccggtctctgcgagggaagcccatggagcatgtctcctcgccctgtgattcgaactcctcatctcttccccgcggagacgtgttgggcagttccagacctcacaggaggaggccatgtgtgcaacaaagcctgtcaagttcgttcacttgtgaaaaggaccccgagtgcaaagtggaccacaagaaggggctcaggaaaagtgaaaacccaagaggcccgttggtcctcccagctggaggtggtgcccaagatgagagtgggtccagaatccaccacaaaaattggactcttgcaagtaagaggggaggaaactcagcgcagaaggctagcttgtgcctgaatggatcttccctttcagaggacgacacggagagagacatggggagcaaaggaggcagctgggcagccccgtccttgccctccggggtcagggaggacgatccctgtgccaacgctgagggacacgaccccggtctgccgttgggcagcctcactgcgcccccagcccctgagccctcggcctgctcagagcctggagaatgccctgcgaaaaagaggccgcgcctggatggcagccaaaggccgcctgccgtgcagctggagcccatggcagcaggggccgcaccatcccccgggccggggccagggcccagagagtctgtgaccccgcgcagcaccgccaggctgggcccgcctccctcccacgcctctgcggatgcaaccagatgtcttccttgcccggattcccagaagctggagaaaggtaaaagtttctcgtggaggaggagagcgcagagggtggagtcctgctcctccgcagccagactgggagccaggcacgtgggtgtttttgaccagattttaatgagatcgttgccaaaatagacttagagcagagacttcctcattcctttttgtctgtctccccactgggctataattgcttcaacttctaaatatttgtcttcttatttttgtttagaagggaagggagttgagtgagtggggagcccgtagaggggcggcgggccacgattgtctgcggcgcggctgggagcattgtggctgtgctgaggccgcagctgcggctgcaccccgaggattaactcttttaacggaagcagtaacgcattcctattaaattgggcagcaatctcaaaagtgattcactcactcaaaagactgactttttaaagaattcctgtgcagatatatttttgtgtggttgcaggcaagcactgtgacttttttccttttaacactgtagcatcctttattttttaaatgctagttcagaaatcttaattaccacatgatcaaatgtctggaaatctacttgctacaaacttaccgcgcagatatttcagtctgtactctgaacttctttcctgaggtcatcatctccttagcacgttggaagcggcagggaactgaggttgccacgctctgaagacaaagtgaccgcacccctaccctgttccatagtcagctcccgtcccggccccctccctgcgtatccgcacctctgtcctgttccatagtcagctcccgtcctggccccctccctgcgtatccgcacccctaccctgttctatagtcagctcctgtcctggccccctccctgcatatccactgattgcttcagatgtgaagggacagccaggccgggacaaaagggattcccacccagggtgcgcgcagcttctgtggccgaggtggctgctgcttacggcccgccttcccttcaccgcaggcctctctccctccctccttccctccttccctccttccctcttgcgtttttctttaaaatgtagtttattagaagcgcactctgtttgaatttggcagtgtggagttgtgtatagcatggaaccttttctttatgcatcgatggtcatgtgtcatgaaatgttttcttgggatgagtcatcaagacaatgcaatgaccatgaaagtctaatatcacattattggcagagtgccagtcttccgaagagtccatggggtctaattccatgcgttctatcctggaggaagacgaggaagacgaggagccaccaagagtccttttataccacggtaagaaatgatcagggggcgccggcagtcctaacggtgcgctcagaggcagcggcggcggggctccgagaccgggccccacattctccatgaaaggtctcctgcgagttcatttctctcccactgaaccgagacctggaagggaccttcagaagtgtcacgttttcagtcctctatcttaagaataacctacacaaagggacgagagactcctgggaagagacggcccagccctccctgttagagcattactcctgtcacttacctcaagcccttgtcctcctgtcccctcgcggggagtgagggatggcccagtgagccgaggggctgcgtcgccattgctcgggtgtggccacgtactgtctcgcggcttccgttggtgatggcgtttggggggctgtccagggaggcagggccttcagcccaagagtgaactgctcccgcgcccctcctgtaagtagctgcttgcactagaggaaaacctgcctttaggtgcccctgagcatctacgtggaagggactagaaatgagagacccaaagatctgagccagccgcgaacagaaagtcggcttcgcaaaccaagtcacaagaaccagccccacttgagactcgcccgtgaaccattcctcttaaccaagtcttgtttttcttttctttaaccttctagtttcagaataattatagattcacaggatgttgcaaaaatagtaaagggaggtgagggggcttctcacccgggcttccccactggcagcatccgtaaggcgcaggatgtccccggccaggaagctggtgcgtgtgcagcctcgggagcgccattccacgcacacttgcgtgccggtggccttgttatgtcgttctttttttgtctacactgtttgagtgcttttccatcattgaaagggcttcattacagtctcacattttcccttttttttgcctaatgctaatggtcagactttttaacagttttccacatgctcttctgatccttttcctctggggtgagcagtcaccactcaccaaaccctgccccacccattgggcacctgtctggatggtcccaggaccgcaggtgctgtggggcacccattggggacttccaggaaatcatttctgcaggatccgttcgcacacacgaagagcacagtgccctcgggaagggccctttccgaccacgctgccccactggggttgggtcaccgggacatacagaggctggtgctgcctggcttctcctgcctgcggtgggagctgggttttgctcccgtttggttttgttttctacctgtcaggctgggcgtctttctgagggttccctgaccggcctctgaattgattgtttgtccacgtgggcctggaagtttctcttaaagactaaatgcccctcactggggaaacgacgctgtgccatgttcacagcagacactcaccccagtgggcctccctttttctctggtcacgttggttacttcataggcctttaggttttgatctgtgtttatggaccacggcacttccttccttccacagtgcggtcagacacaggctttgtgtgtctaacgacagactgtttccagtagtttttctaatactttagttttaaaattttaaataattcacttgttttttggcattgaaaatatttcattcataaatagtttctagttatgatttaaataattttcccatttttgactgtagtttcccagaatcctctttagaatctcagtccttgtgtttgggtcttctccgcgtgccattacctcacctctgttttgtgccacacactctttaaaagtgtcttcccgcggggtttagagttaggaaagtcgcgcacacataggacagagccccagccgcccctcgtggcacccctcccatcccaagggtgcgtttgtcgcagctgggaacccagtgcagcaccccactcagctgctggtttcactgtctcatcattggtggttagactcaagtagtgtggggtatgtgaatctgcctttcagattctcctgatcttttaagcgaatgacacaaagtcaggttttaacaatatcgtgctaactgtgttttctcaggctgttacacctggtgcttgatatggatttgacttgtctattcttttttttttgtttttcttttttctttaattctagaaccacgttcgtttgaagtaggaatgctagtctggcataaacataaaaaataccccttctggccagcagtggtaagaacagcttcctccgtcttctcagatgtagttacttaaatttcatgaatttttattccatccatctttagttcttgataatttgatcaggataaatgttttcattgttttgtttttcctgggaaaagttggtgggtttttagaaaagacttcaggagatgcctgtacctaaattaaggcacaatggtgttaagttgataggccacattttcaccaagcaggcttagaaagacctactcgaaaaaaatatttgcggccgggtgcagtggttcatgcctgtaatcccagcactttgggaggccgaagtgggtggatcacctgaggtcgggagttcgagaccagcctggccaacatggtgaaaccctgactctactaaaaatacaaaaaattagccgggcgtggtggcgtgcgcctgtaatcccagctactcgggaggctgaggcaggagaatggcgtgaacccgagaggtagaggttgcagtgagccaagactgtgccattgtactccagcctgggtgacagagtgagactccgtctccgggggaaagaaaaaggaaaaaaaagaattgtgatttgctcattttaaatattgtgcatttcaccccatgagagctcattaatttggattttgtggtggggttggttgcatgtgtacaaacaggaattcgaaatcctgtccaagttcccggtgtgggtgatgagttcaagccggggcagattctctgcttctgtctctgcaggcctggaagttgcaggtcattggtttgggtgctgtcctggccttcgcctctccttcatatcttacccctttttccctttatcctcctaagacacaaacgccaaaaggcgttggccctgcagtaatccagagacgcctttgttgctctaatgactgacctcactcgagtcacccaggctccttgcatgtgactgattgtggttccgggaaaccggggattgaatctgtgtggtgttcgctggggaggttcaacacgtttatggcctagctgggctccttgtgtcgcctactggccggcggagatggaggccgggcttctggaccctccgccctcccttggcactggtttcctctcccgcaccttggtagtctttcccttgttttcatcagtttctggggtccctgctgggttaacaggtcactgatgtgacaggttcctggggcataagagcaggcagcctccctgagagcgcagggcggaagggccatcggaggcgctggtcgccactgctcctcactgccttctcacggtggccccgggaggccaggactggggaggctgtggggaggtggcagcgccctgtagtccctgcccctccccgtgtggcctgggcttgttcccgagcctttctgcacttcctccactcacccagagcattaggaggacaaacctgccctgctgagccgctggagaatctcaggacgcttatttaaagaggcagctggcagcggtagctgtggttctttttattcaaaaacccaaacaaaactggctgattccgctcagatgggaaaacgttcaagtgatgcgtgtggcagagcatggggccgtttctcagcgcctccttgcgggagacttcgctggggtcacccccagagctggggtcagcgcctgttagatgtatcatgtgatgtcacaaaaaaatatttaaaatccacgatctcttttgttttgacgttttattttcttggatttgtgaacaggtcaaaagcgtcaggcagagagataagaaagcaagtgtgctatacatcgaaggacacatgaacccgaaaatgaaagggtaacccgctgttcttggtttctgtgaatgggcctgaggggccaggccggccgctctcagagtcagagcgggcgtggggatggagggacagaggggaggccccggcaggagtccaggcccgggcagggctagtgaggtctcactggaggtgtgcccttcttgtggcctctcactccctgggatgggtgagtcagacagaggctgggtgtgaagggtctggtcaaacaccccagttttcacaacttgatttgctggctttgaaaggcagcccaaccagacactcactggggccctgtttcccacaaaccagcaaaatgtccacgcaggtgtgcagacagcatccctgcgtccacctgagtttgcccctgggttacctggtcgttccttagtcatgggatgaaagcacacgtggatggatcagccggctgaaagcagcctttagaaccatcgcattgcatatccccaagtcgaacgcgcagaaccggtgtcatctggtacttctgtgctgcccccgaggggtgggaggtgtggagtggagacccaggccccgaggtcggcctgtcctggcggggcccagtcagtgttgctgaagtcactggacccaccatggtgcattgggagcttcttggcagctggggaaacggtcaccttccataaataagctggggctggtggggcctccagcggcctccactgatcttaatcagagacagggaaaggtttttagcttattagaggaagttcattcatgttaacttttccctctctctgcttcaagtttcacagtgtctcttaaaagtttaaagcactttgattgtaaagagaaacagacgcttctggtaggtggatgatgttttgtgcttgctttaaatggtttactttgtgattagtaaatatgtcctctgtgtgtagctcttgaaatccatggctgcggtgtacgcgtgtgaatgattgtgggaagtagcagagccaggctgcgctctggccgttagagttagatcgtgggctcagtcactgcgctgaattctcacaactgtcctgggaagttgcggccccatttccccgctttacgggtaaggaagctggggctccggcgaggacagtttacccagggccaccaggcaaggctacagcagagagcctctgcgcaaggccaccgccttccctggccgactgtctcagtccaccccatgtcacggtggcctcggtagccagccccttgcggccgggggcgtccctagctcagcgtcgggagccctgtgggcgctcaagtgctgcagtgagcctggccgataccacgtggcagacgtcttgctgcagagtggcttcctgctccctggatctgcagccagctttcatcatgtgctgtcgatgaactgcaagggatttgtctaactcagaaatgtctatttcccctctggaaatactcattttgttgtggcgacttccagcaccaacacgtcaactcagtgcagttatttttactcctctggaaaaaaagaaaaagtggttgtgtcttttccactctcagggatctgagttactttcttttgttttttttgagacggagtctcactctgttgcccaggctggagtgcagcggtgcgatctcagctcactgcaacctccacctcctgggttcatgcgattctgctgcctcagccttccgagtagctgggactacaggcaggcaccagcacacccggctaatttttgtatttttagtagagacggggtttcatcatattggccaggttggtctcgaactcctgacctcatgatccgcctgcctcagcctctcaaagtgctgggattacaggtgtgagccactgcgcccggctggaactgagttactttctaaaaatggatgaaggtgtggggtgaggagaagagcaggaagttccgtgccttaaacgcagaagggctgccgtttatatcaaaaaccctgggttctgagagcacagggtgcccgcttcttcttcctaagagtgcgctcacatctgcttgtgagtcaggtatgtggtggtcccgaagcccacttgattcagtggtagtcaccgtggcttctgagggatgatattggggaagccgtgctttaggaaagtgcgggggctgctgggcaggcagagagcggcgtccacccggccctgggatgtgcttatggggtgcccccgtacccctagtggccctcggctccagagtcttccctgggtcattgtgtgatggtcgtggctttatggcatctttgggacggctgtgtccttttctggggacccaccctgctgccagcccaggtgctgttagagcagcccaggtgctggcctagcctggctgcagacgatagctcccaacaaaaacggctgttagagcagcttatttccaggacttgatgtcctgtcatgtggcacagtggccacaggggaggtgtttgcaccgtcgatgcgttcagaccagcccaagccttcgggtccccggtgcccacctgcgttcagaccagcccaagccatcgggtccccggtgcccacctgcgttcagaccagcccaagccatcgggtccccggtgcccacctgcgttcagatcagcccaagccatcgggtccccggtgcccacctgcgttcagatcagcccaagccatcgggtccccggtgcccaccatttgagcagctcagggcccagacctgtgcctggtgcgtttcccatttaccagagggtccctgtgcgaggcgtctgccagagccccctttgtcagggagggtcagaggtgcgggctggagcgtgagcagcctggacacctggctggtccctgggctctgcgtggcttctgaacccagggtgcttggcactgcctcccactgacgcctgctgcccggatctcattgtagaatcaagccagggaggacttcaaccaggacatcggctggtgtgtctccctcatcaccgactacagggtccggttaggtacgtggggtgctggggaggggtggagctgggcagcaggcgtccagcctctgaagaccccttggacgggctgggccggagctgcctggaggcggggcatatttccgtgggcctggggcattccctgtgggtgggctggggttctggcctggcctgattatttcctaaacagagacgccgggccagcccctggaacacacttcctgggactcctcttaggtctacacagtgctctctcccctccaccccctgcaggctgcgggtcttttgctggctctttcctggaatattacgcggctgatataagtaagtctacaggcacatcttggaaaatgtggtttgccttttagccctttagaaaaacaatcttctatgtctgaagctgtggaaggggacgttggggtcaaggcactgtccgcagccacacagcattgttcaacctctatgaggttttgatgtgaccctgaggctccctgggacctggggctgctggtgtccactggcacagcatcccgagcctgccctggggccctcatcccatgggccacatccagcgtgtccctgctgtggctggtggctgcacacatcagatgttgtgaagaatgtaggccaggtgcggaggctcacacctgtaatcccagcactttgggaggctgaagcaagaggattgcttgaggccaggagttcaagactagcttgatcaacagagcaagaccccatctctacagaaaaatagaaaaaaatgagctgggcgtgtggcttgcgtgcctgcagccccagctactcgggaggcagaggtgggagaatggcttgagcccgagagttcaaggctgtggtgacctatgtgattgcaccgctgcactccagcctgggtgacagagcaagacctggtctcaaaaagagaacgtgtcacgaacaccgggatgtttggccaccacttcactgtcgatccagcattttcctttatcgacagtagtggagttttccatgcctcctggttggtggaggagtggacgtggctgaattgattctgcttgggcagtgctgcacgggcaggcgcttttctctgctataagggttaaacctggctgcagggcccagtgaggggggaaaggccgggggtcccagcagaggaagtgtctttaggagcgtgaatgctccactcccgtgctaacacggagctcgatcgctagggtctgcccccatccctgccatgtcgcagcctcccatcggccctgacccacagccacccgaggaaggcagcccacgcgctggtcccacgacaggtgcttcttttgcaggctatcctgtccgaaaatccatccagcaggacgtcttggggaccaagcttcctcaactgagcaaggggagccccgaggagcccgtggtggggtgccccctggggcagaggcagccctgccggaaaatgctccccgaccgctcgcgggccgcccgggaccgggccaaccagaagctggtggagtacattgtgaaggccaagggcgcggagagccacctgcgggccatcctaaagagcaggaagccatctcgctggctgcagaccttcctgagctccagccagtacgtgacctgtgtggagacctacctggaggatgaggggcagctggacctggtggtgaagtacctgcagggcgtctaccaggaggtgggggccaaggtgctccagcgcaccaacggcgaccggatccggttcattctggacgtgcttctgcccgaggtgagccgcggaccggcgtgtcacgtgggcagggaggggcctgcgctgggattttgcaactccgcacgaggaggctgccacggtcctcgcccctgctccctggccgttcggcggccaacggagcgtggaggcctcctgtgtttacatcctgtcagtgctgggaaatgcgagtgcgtgcgcttgaccctgtgcggagacggagccgcttacttgacccctgtgcagagatggagctgcttagaagctgtcagcaccagggggtgcgaactccctccctactgcgggcgcacagatgcttcccagcctcggtgggtcagtcctgggaaacccactgcgagttggaaattcccaagtcagaatcgcatttagtacccagataaacccactgtaagttgaaaaactgtaagtggataatgcgcctcatactctgataaacccgtggtaagttaaacacacaaattagactgtctgtgatttcgaacttcagctgcggatttggggcttggtgaggagcaaatacagatgattttgaagtttgtatctgaaatttcagagaggacattgctgggcatatgtgtacatctgtgggaaaaaaacatactcaaaactatttaactttataactatgggaattttcaaatagacccaaaaagaaaatagcataatgaactctaatgtgcccataacctgcctggaattattttttggagcataaaaaccctcaagcttttttttttttttttttttgagttggagtctcgctctgtcacccaggttggagtgcagtggcgcaatctcggctcactgcaagctctgcctcccaggttcacgccattctcttgtagccttccaagtagctgggactacaggcgcccgccacgacgcccggctaattttttgtatttttagtagagacggggtttcaccatgttggccaggatgatcttgatctcctgacctcgtgatccacccccctcagcctcccaaagtgctgggattacaggcgtgagccaccactcccggccacagtttttttttaagcccataaatacttcagtgtgtgtctctaaaaggagggtgattctgccccctgggggacactggcagtgtctggggacatctgtgcttgtcacagctaagggtgcttctggcatggagtgggttggggcagggacgctgctcagcaccctgcagcgcctaggacagccccacctcagagaacagtctggccccgacgtccacagggccgagtgggagagactctgctctgaaccgaatggactctgttaaaaatgtgtttaccataatcacaaaagtaaaaaatagggatgatttcttaatgtcaggtatgtattgtgtattcaggatactcttttttttttataacaataaacttaaggccgggtgtggtggctcgcatcggtaattccagcactttgggaggccgaggcaggtggatcatgaggccaggagcttgagaccagcctggccaacatggtgaaaccccgtttctactaaaaatacaaaaattagctgggcgtggtggcgcgtacctataatcccagctactcgggaggctgaggcaggagaatcacctgaacccgggaggcagaggttgcagtgagctgagattatgccattgcgctccagcctgggcgacagggcgagactctgtaccagaaaaaaccgccaccaaaaaaaaaacttaaaatttttgagaaatgctcttgtgggtttgggtcttgccttttcttctctgcttttagtgatctgagctattgtgtctagtccgaaagatagtactgatttaattaagaaacatcattacaagcagggattcatggactaggtttgcaccttctgaaccatgagctagaccatgtctggaggctggaacctggtgacccaggctccctgcggccttcttaaccgcaggccacttggggccagttgggcagtgcctgctgctattgagccccgtgccctctcacaggccatcatctgtgcgatctctgcggtggacgaggtggactacaagacggctgaggagaagtacatcaaggggccttcgctgagctaccggtaggccgctcccggcgctatctccagccacttgcgtctctgccttgcagtttctatttccacacccacaggcagtttgactccaggctgccgcagcccctctccctcatgaggtggcccaggtgctgggtggtgagctgatcacatacgctgaactcaccctgtgggtcactcctgccccccaggaaggctgtgcccgggtctcccagctggtcgctgtgggcagcacggggccacgggcacgtgcctgggccgtgtctgttcttaatctctttttgcaggggctgatgtttgctttttgcactttcctcccctctttccacagccccatggctgtgtgagaaatacagcaagattaagcagcagcacggcccggtgctttccagcagccagaagaatgctgtgatcaagatgtttctctcacatccgtgtgcttagctgcccttggatgtttggcccccagagcgcctaatcctgtctctgggcatgcggccaggccttgctgggagccaggcggggcccacggggcagtgacaggctgaagactcaactagagtcaaggacagggtctccggccagggtggcttgcgcagccaccgacgtctcccgggcccacagtcacaggagactcctggtgaagacactgaactccctcaccagccccatgtcctccctgggcagggcaggaggggcccctggagaggccagggaggaggtgtggggcctcggtggcattggcaggccacccccgcagagctgcacaaaggtggaatttggccttgtttagggagtgttggcccagctggcttaccaaaacaggaaaggcctttggatacagaaactgggtgttttcctgctggatcttcatggttcccccgtcatgcttgccgtaagaataagtgaggtccggggagggggtaaggtcggagccaggacacctggacccagcctgctggtttgtcctctccctccgtctcagaagcctcttcaccgctccacgcccatctgtggaaatctttcatcctgatttttttttttgagtctgggttgccgacatcaaaacccgttaggagttcatcacagcttccagttgccatgaaagcctcccgtgacctgtgagaatggtgctggtgctgatggagaagttacttgggctgagcacacaggccgtgatttcatcacgccggggacatgctcaaaataacaagccagtgagcagcatcgcacttgatctttggcctcagtggagccttgggtcacacactgggcgtcctgggacccagtctccccgccgcacggcgtttcccaggccctcttgttcttttagagttgcaccatgagcctctctgcactcttcccaaggctgtcctcctcaggtctgcctttctctggtgctgcggccggtgtgctctcccctatttccaggtctgctggggcgcacatcagagccagcagccgttgttgatctcttttgatccagggcagccctattgctgagaggggttgctagctaagcaattgttataattttcctttacagggaggtcacttagtaaggacaatttggcatctcatactctttcgtaaaaaattatttttagtcagtcacagtggctcatgcctgtaatcccagcactttgagaggctaaggtgggaggatcctctgagcccaggagtttgaggctgtagtgagccatcattatgccactgcaccctagtctgggtgacagagcaacaccctgtctctaaaaataaatattattttaaaacattgttaaggcctggtgcggttgctcacgcccataatcccagcactttgggaggccgaggcaggtggatcacgaggtcaggagttcgagaccatcctggccaccatggtgaaaccccatctctactttaaaaaaaaaaaaaaaccaagcatggtggcacgcgcctatagtcagtcccagctactcagcaggctgaggcaggggaatcgcttgaacccgggaggtggaggttgcagtgagctgagattgtgctactgcattccagcctggtgacagagcgagactccgtttcaaaaaaaaaaaaaaatattacacatcctgtaaaagttaccatcctaaccttcttaagtgtatggttcgatggcggtgagcactttcacagtgctatgcagccggtactgctgctcatctccgaacttcatctttccaaactacagctctgtccccatcaaacaactgccctctcatatatatataatatatattatatatataaaatatatatagccatatatatttatatataatgtatattatataaaatttatatattatataaaatatataaattttatatataatatataaaatcatataatttatatattttatatataaaatatatattatatataaaatatattatatataaaatgtataattttatatattataatatatacaattatataacaattttatatattatataatatataattgtatatattatatataaaatgtacaattttataatatataaaacaatttaatatataatatatataaagtatgtatactttatattatatataaaatatataattttatatatcatatgtatatgtagacatacacacacacacatatgtatttatttatttttttttttttgagacagagtcttgctctgtcacccaggctggagtgcagtggcacagtctcggcccactgcaacccccccaccgtgccttggttcaagcgattcttctgactcagcctcccgagtggctaggattgcaggtgcccactaccacgcctggctaatttttgttatttttagtagagacagcatttcaccatcttggccaggctggtcttgaactcctgatctcgtgatccacccacctcggcctcccaaagtgctgggattacaggcgtgagccaaagtgcctggactctctgtcatactcttttttttttttttttttttagagacagaatttagctctgtcgcccaggctggagtacaatggcatgatcttggctcactgcaagcaccacctcccggtttcaagcgattctcctacctcagcctcctaagtagctgggattacagacatgcgccaccacgcccggctgtttgtttttttttttgtttgtttttttttttttttggtattttttgtagagacagggtttcaccgtgttagccaggatggtcctgatctcctgaccttgtgatccgcctgcctcggcctcccaaagtgctgggattacaggcgtgagcgaccacacccagtcctctctctcatattctttaacacacaatgattaattactaaaatgaagactcttgttttctgaagggaaaaagaaatatttgacaaccagctccttgaagagcggaaccggcgccgtcggtgagggagcagccggctgtgctgtcagcggggcctggcggtggaagcgcctccagtgtgcatgagcgtgtctgaagatggggggctcagggggcacgtttgcgtttggacctgtctgtgcgttctcctgcgtggcagtcctgatttccatgcttctggagaatccatttcgttaacactgaaagccagttctcttttcctggcagtttttttcattttatttttggcattttttacaagataccgttcgggaaaggcttttgaaaggacggaagcgtattcactgtgcgccagtactcctggctgtgctgtggtttctcccgacgtgcacatcgatctcgtatgtgtggcatctgatattaaacgggaggttttaagaagcgtctgccgtgatcatggagcttcggaagcgggaatggttcttccgggtttgctgttttgtctgtttcccccttgtgtggtttccgcctgcgacagttccagaatttgctctcccactcagtgtgctctgcagctgtgaggaaacagccttcgttagaggcgggagcagagacgagccgctgctctgtgtcgtgtttgctgtggccgcagggagaggagcaggacacgcacctttccaggggcctctgtgtcccgcactgtgtgtgagtggaccgcagcgcgcagccacatgccctggctgccatgggccagaccgcctccacctcccccgcccgcctggcctgtcctgagtgcatttccctgcactgtgtcgtcactgcacagccagtcaccgcggtctcagtcatcggcgcggatggctatgctggggtcccagggtggccgcagcagtcagggtcactgtgggagccctggggtggagtgacaaaccgcattgtcctgtgcccgccatggcagaagcgcagcctttgtatggaggcccaaccgcgctcccgtctggagaagcggcttccggggtgtggctgccgggtcggctctggtccacagcacggtgccggggctgcaggttgttgagggctgtgactccgtggggctcagccaggctccagcagggtcagacgtgctgttaagagcaaagccacagacgatgacttgtccattctcagtggatgctccaggctgtgcctacacagcagtgctggtgacatgtccagggttccagggcccggtggcctgggagctgctttctccccactggctgggctgcatctggccctggctggaggccttgctttgaggggctgtgaccctcttcccccaggccctccccagccgacgacagccaccggagaggagatcggaacacgattgtctcagatgcagggcgctgtgcgggacgaagccgcaaggactctcgtatcgggcccttgggactcgggaggtgccagaggcggcggctgctctggacctcggtgttcactgacctttgtttcacttgcctctgctcgactccgagagcaggaaacccggccgtggcctggcagctccgcctcccatgcccgcacgctggggtctgtcttgtctggagcagtggggcacaccccggaggaggcgggggtcagggctgtcggccttggccccctgctggtcgctgtttcggggactcggggcggccagtaccaccgcctgaggcggggctcagcagcgttgcatgtacgggcctcgtactgcctcatggaaaatcctccggagccgccctccattgtgggttcctgagagtaggacacattgccatggttttgtgggaatcacgcgcccctgatggaacttttctgctgttgtgaagtacttttatccatttgcttctctgctgaccttgccaagttgttcgaggtggaattaaacacctcccagacctctggcttgtcttttctgaacccccaaacacatcccactgcatgggttgtccaagcttggaaatgggagagtgaccctgccatccccagggacatggcctggccttggggtggattcccacctcactggcgggcctagggtgctgtttaaacagcagccagaggctgggcgcggtggctcacgcctgcaatcccagcactttgggaggccaaggcaggtggataacctgaggttagaagttcgagaccagcctggccaacatggtaaaacctcatctctgctaaaaaaaattagcgagcatggtggtgggcgcctgtagtcctagcacctggggaggctgaggcaggagaattgcttgaacccgggaggcagaggttgcagtgagccgagatcacgccactgcactccagcctggccacacagtgagactccgtctcaaaaaaataaacagcagccaggggcctcactggggttcatgcctgtggccccagctactggggaggcttagatgggaggaacacttgtttggaggtcaaggctgcggctccagtgagccgagatcacgccactgcactccagccggaatgacgatgagcacctgtgttgcagcatagccctgcccagcaggtggaaccagaatgtgccagaggcccccttgtgcgtcccaccccgcctgcaccctctgcccttactgtcctgtgggctctgagggtgtcaaggccgctgggacaggccctgcctgggtgcttccctcagtaatggggggtcgtgggtgctctgggttgtcagccgggcagttgagtgggagtcaggggtgctgacctcacaggcacggccagtgaggagcattccggggccctgaggatgccagcatgggtggtcctgggctcgccctctccacagcatggctggcgttcctcgactgccgccggagccccgggaagacaggcttgaccccgtgcacacacgcagggagacgccaggagccctgccctcagaagcctgcacgctttgcctctcttctggcagctagctaaccctgcatccccacctgagcctgtccctggcactgaggacactggacctgtgtcactggggtggggtgtcctgggtcctgctgggtgctgagtgtctccatgccaggagctcccgcctctaccatcgagatgaccacagatgtccccagacgtggcctggtgctccgtggaaaactgctgtccacaaaccatggcgtccttcccctgacccccgccccttccctctctggcttggcccagcgggtgtctcagaacctgggtgcgtgcttctgccagccccccaaccacctggcccacactccccaacccccttcactgagccgcagagacccccatgtccctgccaatgctttttccgaagccggtctcacttgttcccgccctggcagtgtgaggggaattggggtcccccctcagtggcacagctgtgcctgtctgatgacttccaccaagcccccttcactgagctgcagagacccccatgtccctgccagtgctttttccgaagccagtctcacttgttcccagcagtgtgaggggaattgaggttccccctcagtggcacagctgtgcctgtcggatcacttccaacaaggtggccttggtggccgcacggggcacttcgtccatcttaaaggggcaacacaggcatgcagcgagaattccaaaccacagaaacctcactctcatgggccccactgcctgaggcattttctgttttgcttttgttggtgggttggttggttggttggttggtttgagacagggtctggctctgttgcccaggctggagtacagtggtgcaaacgtggctcactgcagccttgacctccctggctcaagcgatcctcccacttcagcctcccaagaagctgggaccacaggtgtgcaccaccatgcccggctaatttttgtgcttcttgtagaaatggtgcttgctgtgtttccgaggctaagtgatcctcatcggcctccaaagtgctgagattataggcgagagccactgcagctggcctgcctgagttcttgtgcctctctgcctccctccctgtgccagcctcacgccccctcctcaccttccccaattcctactctcaccccgccctgggtccttcccctctcactggcctgagctgtttctggaactgctgcctgccctctgctcatgtcctgcctctgccccgtgaaaccagctcctccatgttccctgtctcaggggtgtcctccagggcccggagttcctgaaccagattcttctccccacctacctcacctttctgtccagtccgcctatcagtcagccccctttgcagcagaatgccaccccaaaacccagcgcctggaacattctccacacagtttctgtggggccgggatctaagggcagcccggccaggggcttctagggtggctcgtggggctgcagtccacatgctggttggggccacatcatcagaaggctccaacggggctgggggtctgaggagcctcgctgggggcagcagcccaggagccacagcagccgcccatgaatatcaccgccattctgttggtcacacagagcagccccggttgaacgtgaagaccctataggggctgggcttggtggctcacacctgtaatcccagaactctgggaggccaaggtgggcagatcacctgaggtcagaagtttgagcccagcctggccaacatggtgaaaccccatctctactaaaaatacaaaaattagccgggtgtggtggtggatgcgtgtaatctcagctactcaggaggctgaagcaggacaattgcttaaacccaggaggcagaggttgcagtgagctgagattgtgccattgcactccagcctgggggacagagcgagactccgtctcaaaaaaagaaaaaagaccccataggaaggcaagagcctgaacagcaaacgcaagcccaggagccctgtcatcccagcggccagaggaccatcccccttggctcccactgaactcagctgcagtccccaccccatcccccaccaccactagggctaagagccagcagaaatccttgggctggcttcattgttcctcccgggaagagtccagggcagctgacacatgatcccagcatggcacgccggggacaggggaggcactctgctgtccctgactgtatttaaaaaaaaaaaatccacaagcaaaatccctaatgagcaatgttccacagtaagtcctgcctcagaactgtgcaggcatcagaaacaggaatgcctgagaaacggccacggtcccaggagctgaggaaacaccacgcctgatgccacgtagggtcctggatggagccctaggccaggaaagggcattagaggaaacccaggaaacttggatagagtgtagattttggtcagtaataatgtatcatgtgacaaatgtatcacactcatgaactgggcatggggtactcacaactctaaattattctaaaaatattgatataaatttaagaccaaaaccatggccaggcgtggtgcctcactcctgaatcccagcactctgggaggccgaggtgggcagatcacctgaggtcaggagttcgagaccagcctggccaacaaaccctgtctctattcaaaatacaaaaactagccgggcatcgtagtgtgtgcatgtaatcccagctactcaggaggctgaggcaggagaatcacttgatccagggaggtggaggctgcagtgagctgagatcttgccactgtactccagcctgggtgacagagcaagactccatctcaaaaaataaataaataaaaataaaaccaaaaccctacagcacgggcagctatgagaactagagaaggaagagggttttgtgcacctgccagcctcttaggttcttgtcagcttttcccccaagtctttattattattatgtattgtagagatggggtcttgctatgttgcccagactggtctcaagctcctggcttcaagtgatcctcctgcctcggcttcctaaagtgctgggattgcaggtgtgagccaccatgctgggcccctccaatccttttgagctgcccaagaacagagaccaggcctggctttgctcagcagtgggtccccagcccatggcacgaattcagtaaacacttgttgtggtcctcaaggggcccccagtcttgctagtcacctgtgttcacctaatttgagcctctgttttctttactttttctttttcttttttcttttttttttttttttgagatggagtctcactctgtcgcccaggctggagtgcggtggcacgatctcagctcattgcaacctccgcttcccggattcaagtgattctcttgcctcagcctcccgagtagctgggatttagatacagggtttcaccatattggccaggttggttttgaactcctgacctcaggtgatttgcctgcctcagcctcccaaagtgctgggattacaggcgtgaaccaccgcaccggcctttgcctctgtttttgtaatcataaaacaggcagacaaaacctccagtggaattgtgaaaattaaatgatatgcatgcagaaagcgttctgcaaactctgttttgctagtttgggtgtttagtgttagtttttatatcattagtactggttgtaaacttatcaatttaagcaagatggaaaatcgagggtgtgtcagggaagggggaagtttgagctgaaattatgacctcttaggggtgggaagaggaggctttggggttgtgaggtctgagcccccttactttgggatgagtccacatcgcggcgactcctctgcagaatgcggtgatgttgcggtaaggggtccgggatagctgcgaggcagctggaccaatcctgaacgaaagacatcagtgatcgcaagaggcgctaaaacttctgccgaaacccgggatcgaaccagggacctttagatcttcagtctaacgctctcccaactgagctatttcggctgggcggcagagtcgctctcgccgggactccgtcccgcgctgcgccttccctgcgcaggcgcagtcgtttcgcgtcagcaggccccacatcctttgtaaggtctcccagggcgccggagcgcagtgtcgtctctgtggcgcaatcggttagcgcgttcggctgttaaccgaaaggttggtggttcgagcccacccagggacgcgtggtgacttttgccctcctggaataacaagaaaatgagtgtcgcctctgtttttgtcggtccgccgcagacccgcggcccccacgtgcgcactccgatgacctttccgcctcgggtgatctgggggtgcacggcgcaacacgaccacggaggccgaaagcgcagcggaacctcccggctccaggttccggtttccgcatgcgctccgagccgctttgggcggcggccccgggaacccggagcgctaaggagaacggacctcagaggttgtctgaaggccgaggccaagatggcggtgctgtcaggtgagcgcggcaccggcggcgggtgtggggccgcgcgggtctggggccgtgggagcctcgggtgtcgtggtggcgtcgggggtcggtgccggcgtcgtggccgcggtcctctccgggcttctccgagccggccgctcctcgggctccccgcccggcttgcgatgaacggtcgccgttattgcgtccagagtacagtcggggaaaccgaggcccggtaggtcatgacgcaagcctccagcctcaggaaggcgctcggggtggaggctggaggggccccattcacgtccccgagaccagggcacggcccgcgaggctgctcttgagatgccctggagagagcggggcctgcctgacaggctgggaaactgaggcccattgagggtcttcgaggtcacagggccgggcctgggaaggaacaggacccaggacatccacgccaccctgctggaccctccacctccctccccacccctgggaggtaagggcctctcgcagagcctgtcctgctccagggacttttttgggatcagctgaagcctgcggacctctgctcagataaagttattaaatgcatggaataaaatccatagaattgcaaggaaatcagttacacggagaggcagttattaaaagattgtcttgaaacctgattggcgacttagtaatctaagtgcttcccttatgaacgcgatctagcggcaggtctaattgcgactgtgatttggaaggagtgaggagtggaaatgaggctttgatgatacggaaacgtctgcagcccctgcaccatagctaggaaacatctgtgattccgcttggtgaaaagttacaggtcctgctaatactgccgtattttgttgtctatgctaagaattttttatttatttattaagacagggtctgcctctgtcgctcagactggagtgcagtggtgccatcttggctcatcactgcaacctgtgcctcccaggctcaagcgattctggcacttcagtgtcctgtgtagctgggaccacaggtgtgcgccaccatgcctggctagtttttgtatttttagtagagatgggggtcttgccctgttgcccaggctggtctcgaacttctgagttcaagcaatcctcccacctgagcctcccaaagtgctgggagccacggcacccagcctacgctaagaattgaatgaagggctaattttccataagatgctggtgacaacaaagacatatatatttttttattccaagcaaattcacagttctgaatcctcaccaggccccttgttaagaatgcctggcccacgcgcggtggctcacgcctgtaatcccagcactttggaaggccaaggtgggcggatcacctgaggtccggagttcgagaccagcctggccaacatggagaaaccccgtctctactaaaaatacaaaatcagctgggtgtggtggcgcatgcctgtaatcgcagctactggggggctggggcaagagaatcgcttgaacccgggaggcggaggttgcagtgagctaagattgcaccattgcactccatcctgggcaacaagagtgaaactccgtctcaaaaacaaaaacaaaaacaaaccagctgggcgtggtggctcaggcctgtaatcccagcactttgggaggccgaggtgggcggatcccctgagttcgggagttcaagaccagcctgatcaacatggagaaaccctgtctctactaaaaaatgcaaaattagctgagcgtggtagcaggcgcctgtaatcccagctactcgggaggctgaggcaggagaatagcttgaacctgggaggtggaggttgcagtgagccaagattgtgccgttgcactccagcctgggtgacaagagcgaaactccgtctcaaaacaacaacaacaacaacaaaaaccctgacccagaggcacagaatcccatcacctcagaggttctcagaagagtatctcctctgctaggagctcatccaaagtcctgcattttcagcttgggaaactgacacctggagtggggcagctcccaccagagcctggggctgggcagttagcctgtctgctgtgcccagcctcaggcatgccaagaagtaggtcacaggcttgtgtccttcagagagttgtggcctggacggggccatgggaaacagcaaccccggatgaggctaaggctggggtgagggaggggctcagaggcaggagaaggccccatggatcgctgcattcaggggcatcaaaccctggccctggcccctggaggctgcccacagcctctccatcgggcctcacctcacccacagcgacaaagtaccatcacctgggcagcttcaacagaagctgattgttctcacagttctgggggctggaaggccaagattgggggtcagcagggttggttcctgctgaggcctctgtccttggcttgcccgtggccatcttctccctgcgtctttcctctgtacatgtttgtgtcctgatcgccttttcttacaaggacataagtcatatcggatgagggcccaccctcgtgacctcactgtcctttataatgaccctttattttattttttgagatggagtctccctctgtcacccaagctggagtgcagtggcgcagcctctgctcactgcaacctctacctcccgggttcaagtgattctcctgcctcagcctctcgagtagctgggattacaggtacctgctactacacccagctaatttttgtatttttagtagagacggggtttcaccatgttgcccaggctggtctcgaactcctgacctcaggtgatccacctgcctcggcctcctgaagtgctggaattacaggcatgagccaccacgcccaggcattaatgatccctttaaagaccccatctccaaaagcagtcacattctgaggtcctggggttagggcttcagatgcaggtcgggtggagggtcacagttcagccgtcaccagcaccaagcctgcctttctggattcttccttgtgagccaggattcctggcacctccaggtttcctcccgctgagtgccccgggcgtggcaaggccctgctctggccttagtcttcgcctcgggaaggctctcccaggagacttcgtgcaggcgcgttccctcctctgcgcttcctttgaggctggctcctctaggggtgcttttctgtgtagattgacgtgggcagcgccctccccgcttagcggactgcagattcctgcaggatggggcctgtgctcagctgcgtgggaaacgcccgagcagcagccagggcctggagcacccagcacacgcttgtcaggcacagctgaggccaggacgagcactgggtgcccagggaggccccagcattgctggagtggcaggcaccccacaagcacgcatagatggagatagaaccgggtgccggcaaccggaggacctggggtcctggtgtaggcgggacgccccgggtatctgaactgaaacctgcctcatgagaaggggccagcagtgtgcaagtgtgaggcggggtgtcccccgcagggcagcagccagtgtgcaagtgtgaggcggggtgtcccccacagggcagcagccagtgcgggggccctggcgcaggaaagcggcaggtgccagtgaagatcgccagggcggggagacggggcagcgtttgggttccttccggggccatgcagtctcaagcaggggactaagactctctcgtgttctgaaaaccccctcgttacctaacgtttgttaagtggcactcgagttgggatcagagctaggctgtgcgggcaggagcctgatggggaagcgcctggaggccggccctgcgtgctgcccgcagctcactgttcccaccccgtggtcctctctgcagctcctggcctgcgcggcttccggatccttggtctgcggtgagtgcctgagtctccagccctcagctgggaggggccttcagcagcgacagacgaacggggcggggggggtggggggtggggggagcgccttgttgaaggtcacgtgtcatgttagggacaggatgcaggtgacggtctgcacgctgcccgtgatgtgccgggaccctccctgggacagtccacgcagtggcaaaggctggacagtcaggaggaaaaccctgtgggcccggctcagtgccgtcagagctcaccgccacctggggtgggaaggcattctctgagccctgtgcagatggcagctggggcaggcctcctgcagacccaggtgactgacagggcggtgagggcgcatgcccagggatcttaccttggtcatgtgtggagggcctgctgccagtttccttctgtggatgatcctgggaccgtccttgcttggacactgttgacctgctgggtacgtcacaaaagaagttccattcaagtctgggccatcattgggggtcggggcgatggccgcatggctccagcggctctggccagtggcccaagtgttgacaggcagaggtgagaacagtctcgcagcagggaggggagaggcaggacaacagtgagtgcggctgggggagctggaggggcctgggacagccactgacccgcgttccatctcccggcagctccagcgtgggcccggctgtgcaggcacgaggtgtccatcagagcgtggccaccgatggcccaagcaggtgaagctggccttctgggggaggtcgtaccccctcgccccacccccatcccttccttattttctgcatcagtgccgcagccactgaggtgcatggatggggcagggagggggtcacacatcccagtccctgacctcatgtgggtccaggcctctggcagcggccgtgggggctcgcatccgcctctgggaagcacctgcgtggctgacgcctcctgtgcccgtgtgtctctgtgccagcacccagcctgccctgccaaaggccagagccgtggctcccaaacccagcagccggggcgagtatgtggtggccaagctggatgacctcgtcaactgggcccgccgggtgagtactatgagctgtaggccctcctcgagcgccagggcctctctgcacactcacaggcacacacatacacacaccaacgtgcagacacgtacacacacaacacatgcatgcacactcacatgcgcacatgtgcatgcaagctcacatgtatggacagatgtgtacacggaccacacgcacactcacgcacacaatgcacatatgcacactcgcacacatgcacacttgcacacacatgcacacacaagcacatgtgcacacacgcttgcacacatacacacatgcacacttgcactcatgcacactcatgcgcacatatacacatgcacacgcacactcgcacacacgtgcacatatatgcacagtcatgcacacacatgcacactcacacacatgcacacacgtccttgtgtggacacatgcatgtgtgcctgttggcatgcatgcacacaggcacactcactgatgcacacacacccctgcggccgtggagcagggcggaccctcccggaggcccctgtgctggcctggtggcctgtggttccatctgaggattcggaccctgctggagatgacccctccgtttccgtcattctctttctggcgtccgtgtgttcctcttgtttctcttttaaggtgaaagcagtgttttaagttaaaaggagcgcgtgtgaaggcagtagatccttctcggtacccgtttaaagcctcccctgcctgtggcgccagcccccacgcagcccctgccatccccctgcagcgtgagcacgtgcagctccctccagctcctgcggcacttgctgcgacagcccgggttcaacaatcccccattgatggacgttcactgtttccttttgttttttgtttcctaaacaatgccacggcgaacgtcctgccagggccgcagtggtcgagacaaggatagtttttaatgcaggatagttcttttctttttcttttcttttcttttttttttttttgagacggaggctcgctctgtcgcccaggctggagtgcagtggtgcgatctcggctcactgcatgctccgcttgccgggttctcctgcctcagcctcctaagtagctgggactacaggtgcccgccaccacgcccggctaattttttgtatttttatttttagtagagatggggtttcaccgtgttggccaggatggtctcgatctcctgacctcgtgatccgcccacctcggcctcccaaagtgctgggattacaggcgtgagccaccacgcccggctaatgcaggatagtttctaatggagggaacctgagacatggccagcggccgtcccaacacaggcttctggcgggcaggtggacctggccatttctgcccgggcagccctgcctcactctgtagcctgaccctgtcacccgccaacacatgcagcagggcccctgccaggtctcagagccgcgtgcagggagagcgggaacggtgggggaaatgagaagccacagggatggaggagaggggagggagtggccaaggagatctgagagggcttcctggaggcgtcgcacttggtatgtggacccagatctagttaacgcagagagttcccggttagacctgcgctactactcgcctgtagcccacgcgctcagagagtggctggagccccctgttgaaatggtgggacttaggatacactgggttcgaggaactatgtgatgaggacagatctcacccgtttctctctattttatgtatttgaatgtggctggtggggcgcgctttacaactcttggggcccggaggccacctgcaggagccgctgtgcctctcacctctgccggctgccgccccgggacatgagtcgggggttctgggtgctccacgtggagtctcacgctgggccacgcggggctccgggggtggcgtctgacccgagcccggcctccgcagagttctctgtggcccatgaccttcggcctggcctgctgcgccgtggagatgatgcacatggcagcaccccgctacgacatggaccgctttggcgtggtcttccgcgccagcccgcgccagtccgacgtcatgatcgtggccggcacactcaccaacaagatggccccagcgcttcgcaaggtaggcctcgtcccagccgcccagccgcccccagagtgagctgcgcacggaccccgcctctcttccaggtctacgaccagatgccggagccgcgctacgtggtctccatggggaggtgagtgcagggcggggggtctccagggacagacgtagcgtgagtgctggcctggccgtgccctgatggcgcttatcaaaagtgtcatctacattcagtgaaatcccacgtggtcccggcgctgcccttcagccgtctcggtgcctccaccctaggcagatgcgctggtgggcctctccccagaacgattcctcccatccacccccacgcagcagaccccacattccgcccagttctctgctttactcacacataagtgatgacaggtgctgtagatagttttataatctcagccttctcacttgccattagttttttttctttttttttttttttttgagacagagtcttgctctgtcaacccaggctggagtgcggtggaaccatctcggctcactgcaacctccgcctcccaggttcaagcaattttcctgcctcagcctcccaagtagctgggattacaggcatgcaccaccacacccagctaatttttgtatttttagtagagacggggttttaccatgttggccaggctggtcttgaactccctcaggtgatccgcctgcctcggcctcccaaagtgctgggattataggcataagccaccacgcctggccttgccctcattttttagtcatttccccgtaacattgaaaggtatttagtctcttaacattttaaaatatttatttatttacttaaagatggagtctagctctgtcgcccaggctggagtgcagtggcacgatctcagcccactacaacctccgcctcccaggttcaagcgattctcctgcctcagcctcccgagtagctgggattacaggcacctgccaccacacctggccaatttttgtatttttagtaaagaagaggtttcaccatgttggctaggatggtctcgatctcctgatctcgtgatccacccacctcagcctcccaaagttctgggattacaggcatgagccaccatgcctggccaatatttattatttttattttttagagacagagtctcactgagttgcccaggctggagtgcagtggtgcagtcatagctcactgcagccttgacctcctgggctcaagcggtcccccaaccttagcctctcagagtgctgggattacagatgtactccactgtgcctactttttaaaatttctgtagagatcaggtcttgataagtttacccttttaaagcgagcagttcagtggtttttaggccaccacctctaattccagaacattctcatcacccccaaatgaaatgctgtccccatcagcagtcactctgcatccccttccgagccccggtgcccacacctcccctccctgtctctgtggatgggcccgtcctggacatttcacagaaacaggatcacacgccgcatggccttctgtgtccggcgtctctcactgagcgcgacgtcctcaaggtgcatccgtgctgtggcctgtgtccgagcctcgtgccttttcttggctgaataatatcccactgtgtggacatattactaatctaattctaaacagttaattagaatattccagagttttcataaccgtctcccactgctgggcattcagggtatgtccatttttacggctgtgggaagcagtgctgggagtggagtctgtgtggtctcctggggtttccagctccctgccccgggtggaccccagcgcctcactgacagagccggaatcaggcgagggtgaggctcagccgccccatagacaggggctgggtgttggcactgtggctgtctgaagtggctttttgttgacacatgtgatctgacacatcccagccccgggaatcggtggtcaggagccccctcgggaggggagcacttttccccgagttatcagccacgtgtgagcttgcgccccactggtcccacagaggctctgggagcctgtgcgtgtttgctcattgcttctccgtgacaagttccagcctcgtaggtgcctggcctgcagttgaaggcgggtggggatggggcgaggcctcgtggagggagggtgggcaggcgggtcttcggcacactcccctcacggtgcctccccaacagctgcgccaacggaggaggctactaccactattcctactcggtggtgaggggctgcgaccgcatcgtgcccgtggacatctacatcccaggtagggccgggaccgcaccgcccacgagggagctggagacagggccagcgccacacggagcccggcggcccctgtgagggagtcccacacccccagcagacggcgggctcccccatcctatggatgggccgactcggagcgctgcctcttagtggagcctgtcccctgtgagaagtcggcgatgtattcaggcatcagagggatcagagggagcaggggaagctgagtggaattcctgacacacgcctggtttacagcagtttcatatggtcctacctggcacaaaccaaagacctgcagttagaaataccaagcgagaaggttcctgggggccaaggacactgtcccgcgccctcagccttacagaagggcacgcaggactccctgggacccggggtggccggatttggcaaatgaaaacgtgggaggcttagtttgactgtgaggttagggtgaatttgaccatcaggaaaactgttagtagtaattgtttagtacgagtatatcccaacaatatttgggctatactgacactaaaaagagcattggctgcatacctgaaattcacatcgcaccgggaacattctttatatctggtgatcccgtgggactcttgcacctcacgtggtcccacgagggccatccccccgggcgttcaccttgacagtggtccacggtaggcaggcttggaggtggcgctcatgtgggacaggggacagagtcctgttcttggccaccctgtgctgcgtgcggcattagctcatgcgcagagagcccagccctgagtcccgagtctgggggtttgggcaagcgagaggcacatcctggtgcctctcaaaagtggaggaacaggctctgactttggattccgcttccctggaaagggcgttgatttgttcagcgttctgcacggttcaggtcaccccgggggcagtggagagggcagcctgggcctccctgtgacttgacagcacagagaggtccatcctggggtcaggagctctgcccatgcccctggcgtcttcccctgcagtgcagaccaatggggcaagttgcgagtgtggactgtactcctccctccttgcagactgagctcctccctccctggggaccgcgctcctccctccctgcggactgtgctccctgtctggggactgcgctcctccctccttggggaccgtgctcctccctccctccctgcggaccgcgctcctccctccctggggaccgcgctcctccctccctgcggaccgcgctcggccctccctggggaccgcgcccctccctcccagcggaccgcgctcctccctccctggggacctcgctcctccctccctccctgcggactgtgctgctccctccctgcggactgtgcttctccctcccttggagcagcctggacttgccagagctctgccaggtggggcctggccgccctttcccaggccctgcagtggccttgtcctttctcacctgtttccactcctgctgtccccgttgggccctgggcttcgtcctcttgctcaagccctttgttctgaacctgcgtggcagccgggactgggggatccccagcaaagagctctggcttggggctcagaaagagggtcatcgggtcctcgtgggatgcccgggctctgggccacctcccctccctccgcccagcctccctgcctccatctccgtccagggcagccccgggccctgctccccactgctaagtgtgtctgctgagcgctggcccccattgagtcctgagggctggggccgggggccgggttagtgaggtcagcgtcttgtccgagaggtccctgtgacagcccgggatgagccacgggtggagggcagtggggccttgcccaggggaggaccccactcttcctgcagggacctcccctgcgccggctcccagtccctggcactgcgcccacccagggctgtcagcctccaccttcagaggccggcccgggaaacccttccaaagccgagccggctgcgctgtgcacgcggtcacgcgggctccggctgcgggaagcgagactgaggcaaggtccctgcaggctgcccacctacggccgaggccctgctctacggcatcctgcagctgcagaggaagatcaagcgggagcggaggctgcagatctggtaccgcaggtagcgccgccgccgccgccgccggagcctgtcgccgtcctgtccccagcctgcttgtgtcccgtgaggttgtcaataaacctgccctcgggctgccgcctcccagtgtggtgtgtgggtgaaaggagccggggacgtggggggatcacagaccccctgcggcgtgccgcccttgggctgggggcggttggagcagagccgggggcagagacgggcactgtgcctgccagcagggtcctttcccgctgctctgcgaagaccctggggtggacatcgtggcccaaagtcccgagcgtggaaggccgcacacccatccttcctgggagggccctgactcagtctccctctatgccctaaggcaggctgagcaaagcccgtctgagcctgccccggggttcagagtgtggcctgtggcctgcgtgtggacttgggcaggtcgccactgccctctggcccatttccaggcggtggcatgggctggttagctgagggctggggccagggagatggggaggtggcacctggtccaaaccaaagggctgcagggcaggactgtgagcctcacaggctgtctgaccccactttggggaccctctccacccagggctttcggggaaccctgactccaccccaccagccccttcatccgtcgaagtccaggcctcatcagggacgtgcattcattcagcaaacgtcccatcttcctgtgttcagcgccagatgccgccggtgctgggacctcgctctgcaggcccaccctgcatgcctgctgcacaccagggacagttctggggatcggcagttatgacgggccaggctgggatggggcccgggagactggggcgggggtggggaagaggcacccagcccagccgggtcaagcagcctggaagcaggacatgctggggtggggacagggcgtcagccagcggaacagcagccctgggccagagtgcagagcacaggagccggccttctctcagggcaaggaggtcagtggagggggcgagcaggacggccccaggaagatgggcgggctgcacacatgtggatgcagggggcaaagtgggaggcatggggtgaccagctgggcacaagggcacagacaggcaggacccgggatgttcctggggctgggcaggtggggctgcccctgcaatgggcccagcaggggcgatgcctcctgagaggaaaccacatctggaaatgggaggcttggggaacggggctgtcagcagccacgcccctcctggggcgggaggaggggagctcagggtgtgctggggcgggcagagaagtgggttcctgcctggggtgggcaaagatccttgtcccacccacaccccggccgtggtgctgccaccccctgagaccctgacctagttacccccttccctgaccccactgcaaagggtcaggtggctttcatctgaggaagggacatcgggcatcagctggagatgtctgctatgggcaagacagtggggggggcggggcggatcctggggccgctcagaaacctggaggggagtcacccacttttcctgtgtccatgggatgggcgggaggtgagggagcagccgctggaagtaacagtcgcacgctcactgccgactggccaagcccagcgccggcgtttacttcacctcagggaccctgcagtgggcagcagtgaccctcacagagaagctgggaaagctgctggtgacacacagctgggatcagccctgggctggtgggacccctcacagagaagccgggaaagcttctggtgacacacagctgggatcagcccagggctggtgcgacaccctggactcccggccaggaaggcacggaggagggcatgggtgtggccgggccggggtgggggctcagcctttggtcaccaggggcgtgatcatctgtgggaaggcgtagtagcggcagtcggccggtgggaccagcgccatcacctccgtacggatgttctccctccggaagccggcctccagcagcgcgggcacctgcgtctcctggtcggggatggcaccaggtcacctctgagggccatgggggtcacgtgcaccctggcgcccacccctcattgaagagtgtttacagatggcaaggcccgggtgggcggctgcagctcccgtgggcacgtggcagggcagccctggaagcccaggtgtgaacgggaatctccagctccccagtgcgggcagcagcttcccggctgtcctggaaccccagccccacactcgagccacccccgggcacctactccacagttctccagaccttgccagtgtggcgggtggagccaaagaatcacaccagaaaaagaacacaggccactagttcccattttggaagaaaagctgccccaggggccacaggcacccagccggctctcacaacagcagcccagggcaaccacatagagcccttctcagataggccgcctccaccaggcagagggaacagcgagacaagcactgctgaaccagcaaagacagccaggtggaggcagctggagggaggggaacacgcagggcttaggctgaaccacagggcactggggagccatgggaggttgttgagctggtgagggactttgatttccattttttttgtttttgttttgttgagatggagtctcggtctgttgcccaggctggagtacaacggtgcaatctcggctcacagcaacctccgcctcccatgttcaagtgattctcatgcctcagcctcccgagtagctggaattacaggcgcccgccaccacgcctggctaacttttgtatttttagtagagatgggattctgccatgttggccaggctaggctcaaactcctgggctcaagtgatccacccgccttggccttccgaagtgccgggatcacaggtgtgagccaccacgcccagcctgatttccattttttttttaaattttctttctttctttctttctttcttttttcttgagacagggtctggctctgttacccaggctggagtgcagtggttcgatctgggctcactgcaacctctgcccctggggcccaagcaatcctcctacctcagcctcccaagtagctgggagtacaggcacacgccaccacgcccagctagttttttgtattttttttttttaggaaagatgaggtcttgctctgtagcccaggctggtcttgaactcctaggctcaagcaatctgcccacctcggccttccacagtgctgggattatagacctgagccactgctcctggcagccactgcgccaggcaaaggactttgatttctaaatgaaccagcacagtccagcccacccagggggtcaggaagggaccctccccaggtagcaaggtggctccagcagccccttcccacccccatccaaggtcacttcctggagacccatggggaacttcaggtgggcgcacctcaaacatgatggtgatgtctgagtacttggacttcatcagctccccccaggaggtgaggttgcagtaggtgaggacgccccccggcttcagcaggcgaaaggcgtggttctgtggaaggggagtggccagtggtcaggacggaggtgggggtgtgggcagaggggcttccccgagggcctcccgcatcccagcaagtcagagagaaccaccttgatgaagttgaactggtgtgtgtgccaggtctcctccgagagtgggtacgtgtcgtacaggatccctgcacggagaacagaagcccacgcggtcagggccgggctcagcgcctcacccagcctcacccggctcatcccccagcgggtggaggtgcagtgagacggggccgtgggtagaggtggggctcccacacaggcttgagaaccccgagatcgcctccagggcccctccgtgagcatgcccatccccggtgctccgccatcccacagccaggcccacacccacttgggctctgtccccccagtgcacatcagagggacccccacaagcaaaggaggggctgcattggagctggggaggcccaccctgtgatacgtcccctcacccctcaccatcaaagtgaccgtcaggcagggtgggtgccacatcctcccacaggcctttcaaggggatgaccttgcagaggggaaaagaaaaagagaggacagggtagagaggtccccaggatctccccacctgcagaaagggagcggccagggggactcccgagagagaagaccacctcctccacctctgacagccccaggcccccaacccccaggaagcagtgccctcaccccaaggagtgggggtcctggagggcctgcgggcagaggggcaccttgtgtgtctgccgtggggcccagtcccggagccgctggaagacgccgtcattgcactcgatgatccaatgctcatcaatgggcgcctcctgcacctttgacgctgcgatggccatgccaaagcccacctccaggacccggccccctgggcagacacagggcgcctggcatcactaggtggggcgggcttaggaggctgcctggaggaggggcacagggcagggcagggctggggagactgcctggaggagggggcgcagggctgggctgggggtctgcctggaggggggcgtgcagagcagggctggagaggctgcctggaggagggggtgtggggcaatgctggggaggctgcctggaggagggggtgcggggcagggctggagaggctgccaggaggaggggatgcagggctggggaggctgtctggaagagggggtgcagagcagggctggggaggcttcctggaggagggggcacagggtagggcagggctgagctgggggtctgcttggaggagggggtgcagggctgaactaggctatgtgagtcacatttgccacaggacgggagggcaccctgggccagcatggacagaggcgggcggaacacagtagtcctgagcgggaacagcgtgggccctggccagcggccagagagaggatgaccagccagggaggccgaagacggccgcttttggggccaggcctgtggggaggcgagagccttggactttgagcccagcccacgctgtttgtcccgggtcccttatctctcgggttagttacttttctctccccctccctctatccgaaagttggatttgcaagagtggccaggcaagacctggacttgagactatctgggaggggaaggactggtccccagtgggccacacatgggccccccgctcaatcctgattggcactggacactggacgtgcccattttcagggtgggaacactgaggcccgacccctggacggggcctgtgtggggccagggagtcctttcttagcagcccttagcgtctgacgccaggcaggccagggccaccccggggacagctgtctccctgagctcagctttccgagtgctattcttagccgggcgagtcggggctgctctcccaggcaggcagaagggcagcctctccctggcacgaccccttcctcccgacctcagacagggagctggggacccggttccacccagtttcacccaggtctcacgtttgaggtccccatctggagagcggggggcctcactccccctggagaggaagtttctggtacttaggcggtgcctaacgtgtgcgggccccacgcctgccgcactccccgtgaacgcctccgtgtgcccccacctgcagccccacttcccaggcgaggagacagaggcgccccggcgggagggtgggctgcagagtccccgggtcggggcagccccggcctcagtttcccctgcgcccccgggggcggtgcaggccgggcgggggctacctttggaggaggcggcggcggccagcgcgtgcatatagggggtctcccagcgctccatcaccggcttgcccaggatgcgcaggtgcgtgtccgctgcgtcgtaggccgcgggcgccgccccccacgcggggctgcagttctcgccgggcgcgaagatgggggtcgcgctgggggcgctcatgctgcaggctggacggcgacccgacctcgatcgcgcgccgcccgggcccgctccctgcaggggcttgtgggccgggggcgggtccaacaggcccggggggcggacccgcgagaggacgcgcgcgcgcggctccgggagcggcctctagcggcggccacgcgagaggtggcgggagtggggtcggggccccggccgccccctccccaaggagcctcggtgccccctctgcggagcgggcaccgcagccccgcgcccggggacgcgaacctgcaggctggggactggaatccccgccttgccgcttacgcgccatagattcctcatctgtcagcaccgcagaaaggccccctcctcgctggggtgtgagaatctgaggatcttccaggcgctgttggaagtgctttaagtgtttaaaatcatttaatcttcagaagatgctacagtgagttctgtctttttttaatagagacggggtcttgctatgttgcccaggttggtctcaaactcctgggcgcaagcgatcctcccgcttcagcctcccaaagtgttgggattacaggcgtgagccaccgcgcccgccaggttctatgatgactgtcgtttttccttccttccttccttcctttcttttttgaaagcaagtttattaaggaataaaaatgaatggctactccatagagcagccgactgtcattttacagatgtggaaactgaggctttgagaagcaaagccggtggtctggtggccacgagggtggggacccagcattagagctctgatgcccccctttcatgagcccatgtcacacccccataggctgggggtcatctgagaccccgggtccctaatgggggattccgcccaaagacgcctccagttctggagaccaggactcaatcccagcagtgccctttcctccggcggccctgcagctggggtgtgcgggggtggaattaggcctcccccagcccagggtagccccttagggtcaagcacaccccccgcctgtttcctgggggcccccaagcccgctgcggtggcgtcctggctctgatagccggtttccttccccctctgaacgtggggccacagtcatgagccctgagcactgcctgcctgcctgcctgcctgcctgccgtgcgttctgcacgggttaacagatgcagttattatgcccatttaacacgagggaaactgaggcccagagaggttgaggttcacaggttgcagcagggccacggtgtgaacgcaggcagcctcggaaacagctcccgcgcgcggccttccctgcgccaccttgtctgggtagctgcctgccccatcactgcctgctcaacgcctccacatgcccctgccacctcttgcacagctccttagccccgggccttggcacacgctcttccccttgcccagacagcctctctcctggtcaggccgctttctcgttctgtctcaagctgagcccacgtgtcctctaggagacacccccattctgccccaggacaggcatgtcctggtcagaagctgttttgtttgtttttgtttttctgagacagagtctcactctgttgctcaggttggagtgcagtggcatgattttggctcagtgcaacctctgcctcccgggttcaagcgattctcctacctcagcctcctgggtagctgtgatgacaggcgcccgccaccaagcccggctaattttttttttttttttttttttttgtatttttagtagaaacggggtttcaccatgttagccaggatggtcttgatctcctgacctcgtgattcacccgcctcggcctcctaaagtgctgggattgcaaggtgtgagccaccgcacccacccggccagaagctgttttctctctctttggtagttcactaacggaaggtatttcttcatggtcctagcgtccctctcacagggctgtcagtgatcctggcacacagaacatgcttgataggctgggtgcagcagctcccacctgtgatcccagtgcctgggggaggtgcaggggctcaggcctgtgatcccaccactttgggatgccgaggtagaaggattgcttcagtgcaagagttaagaccagcttagaccacacacagagaccttgtctctacaaaaaaaaaaaagttttaaaaattagccagggccgggcgcggtggctcacgcgtgtaatcccagcactttgggaggctgaggtgggcggatcccctgagaccagcctggcaacacggtgaaaccccatgtctacaaaaatacaaaaatagctgggcgtggtggtgggtgcctgtaatcccagctactcaggaggctgaggcaggagaatcgcttgaacccgggaggcggaggttgcagagaacatcactctcagtgaaataagccagtcgcaacaggacaaatcctatgtgagtccactcctaggaggtccctggagtcctccgatccacagagacagaacgtaggatggcggggggggggggtgccaggggctggggaggggacagggagtgagtatttcacggggcagagtttcagtttgggaagatgagaaggttctggagaggacggcggtgatggttgcacaacaatgggaatgcgcttaatgccaatgagctgtgcacctacaaataattaaaatggggccgggcgtggcggctcacgcctgtcatcccagcactttgggaggccaaggcgggcagatcacctgaggtcaggagttcgagaccagcctcaacatggagaaaccccgtctctactaaaaatacaaaattagccgggcgtggtggtgcgtgcctgtagtcccggctattcgggaggctgaggcagaattacttgaacctgggaggcggaggttgtggtgagccgagatcgagccattgcactccagcctgggcaacaagagagaaactccatctcaaaataaataaataaaataaaaacaaaaataattaaaatggaaaattttatgtcacatatattttaccacaagaaaaaaaggggaccaaaactacataccgtgtgttggatctgtttatagtcacactgggagtaaattcagatcagtatctgcacagcctttttctcgctgcctttgccctggagtggaaggaaggaaatgaatggggaagagggagaagcggagaagtagcctcttctagttctttcttccttccttttttttctttttcttttcttttcttttttttgaggtggggtctcgcactgtagcccaggctggagtgcagtggcgcgatctcggctcactgcaacctgcacctctcatgatcaagcgattctcctgccccagcctcctgagtagctgggattacaggcatccgccaccacacctggcttttttttttttttttgagatggagtcttgcactgtcgcccaggctggagtgcaatggtgtgatctcggctcgctacaacctctgcctcccgggttcaagcgactctcctgcctcagccccctgagtagctgggattacaggcacccgccaccacgcctgcctaatttttgtatttttagtacagacagggtctcgccatgttggccaggctggtctcgaactcctgacctcaggtgacccgcccacctcggcctcccaaagtgctgggattacaggcgtgagccaccgtgcctggcctgtattttaaaaaatatattatttgtaatcagcttgtgcccgacttccttctttgggccacattctgtgcatttcatccacccactgcttcattgttcatttatccagtcaccaatagatggatgtgtggttatttcaaatgttccagtcttgttttgttttgtttttgatagaaacagggtcttgccatgttggccaggctggtctcgaactcctgacctcaggtgacccgcccacctcggcctcccaaattgctgggatcacatgtgtgagccactgagcccagattttttttttttttttggcagggtttggctccgtggcccaggctggagtgcagtagtgcgatgtcggctcactgaaacctccaactcctgagctccagccatcctcctgcctcagcctccaagtagctaggactgcaggtgcgtgccaccaaacctggctgatttttgtattattattattattattattttttgtagagatggggttttgtcatgttggccaggctggtcttgaactcctgggctcaagcgatcctctcatctcagccttccaaggtgctgggattacaggcatgagccactgcatccggccagttttattttaaatggggttttagtcccagctacttgggaggctgaggagggaggatagctggagtccaggagttcaaggctgcagtgagctatgactgcatcattgcactccagcttgggcaacagagtgagagcctgtctcaaaataaaagaaaaaaaagtgttttgtactatttgtctgtgatcttgttccttgtattttttttttttgagacagagtcttgccgtgtcgcccaggctggagtgtagtggcacgatctcggctcactgcaagctctgcctcctgggttcaagcaattctactgcctcagcctcctgagtagctgggactacaggcgcctgccaccatgccgagctaattttttgtacttttagtagagacggggtttcaccatgttagccaggatggtctcgatctcctgacctcgtgatccgcccaccttggcctcccaaactgctgggattccaggagtgagccaccatgctcggcccttttttttctaagagggagtcttgctctgttgcccaggttggtgtgcagtggcgcgatctcggctcactgcaacctctacttcctgccttcaagcatttctccggccttagcttcccgagtagctgggattacaggcgcccaccaccacgcccggctaattttcttttgtatttttagtagagacggggtttcactatatatgttggctaggctggtctcgatctcctgacctaaattgatcctcggcctcccaaagtgttgggattataggcgtgcgccacctcacccggccttgttccttgtatttatttaattctgtgatgatgaataaaccaaacgatcaggctgtcaatgtgctgtgagattaaggagaaaagcagtaggcagcacgtacccggttttacaaaaccctgcgggtcacctgtttactaccgtcagcctagaccggtttttccacctccttctgctgacattggaggacgggtatcattctttttggggggtcgtcgtgtgcactgcagggtgctgagcggcatgtctggtctggacccactcgatgccagcagcaccccgcactcaagttgtgacaaccaaaaccgtgttttcagacattgccaagttatcccctagggggcaaagtcacccagaagaagaaccactgatgtatgcaattaacagatgcaactaaaacagtatttggctattaatagtaatagcacttggggggggggtcaataatatcttttcatagtcattgaatttagttaattgttttgatttgattccagttcagccccgaactgggtgaccttggccaagtgactcagcctctcggaccctcgggatcctcttctgtgaaatgcggacaggggaaggagcctcgcgcgggacgctcacgtgccgttcccgctccgtccgcccgcctggggtgcgggcgggtacactcccactccccgcagcgccccacgcggctccaccgcttccgagtgaagagttaaagaggaagcggcagccgcgcctgcgcccacagtgcctagcccggagcgccggtctcgcaagcgcgcacgcgcacgcaagcccgcacgcgcgcgcacgcacgcacgtggctcggcccgcgcgcatcctccccttgcaggggcggggccagcgcagggactccatttcccagcgtgccccgcggcaacgccaggagcctccgaggagaaaggaaaacgcgcgacggccccgactgcggcggcgcgaaatccgcctcagggacgcacgcacagacggagtacccctggacccgcccccggagaccccgtgcgggagcgcgcccgggcgtgcgcaggggcggcggcgcggcggcgcggggacgcgcggtgaccgttggcgccgaggggaggaggcagccgccgccgccgccgccgccgccgccgccgccgccgccgccgttgcgcagatccgggccgcggctgtggggagggcgacggagcgggtgaccttccggaggcgggagcgagcgaggaggcccgggagcgccgagcgtcgccgccgccgccgccatgaacaactcgggcgccgacgagatcgggtgaggacgagcggcgcgggcctgcgtctccgccccgagcccggcccgccgctccccgccgcccggcctcagacgccgccccccggggccgccccgtcaaggtcacgccggccgggggcggactcgggacccggactcgccgcggcttcgcgccgggggccctggacgggtgcccggggtctgggggggtcctggcgcccccgccgccgcttcccggcttcccgtcctgggggatcctgaaggagagcctgaggggtccggggggccccgccgccgcctccagacttcctggtcgggggaaccccgaacggcaacctgggggggtgtcctggggcgcccgtgccgccgcttcccgactgcgcgtcctgagggaccccgaatgggagccagaggggttcaggggcccccgccgccgcttcctggttgtggcggccccgaacgggaacttgggggggtctggagcgtccccgttgccgcctgtagggcttcctggcctgggggaccccgaatgagaacctgagggagtctgcggggagtccagggcgccgtcgccgccgcctcccggcttcctggccagggggaccccaaactgtggcgtggggggtggtccggggcgcccccagcgcgcgcccaaacttggcgggcggcgcacgtggcgagccgaggcgagggttccggttctgccaccgcccaacctatcccactcggggctccgggctccccgctcccatcccacccccccaaagtggtaaggtcgggaggggttcgcaaacccagggcccagggggctcgggtcagccggggcctgctgtgtttacgttgcctcggcgcctccccgccgggggtgggcttgagctgcggaagggagagtcagcgcttccgaggcggcgacgggcccgcggatctttgctgcgccgaggcgtcccctcctataggagcctgacctgctccggaccccgcggggccgggaaacctcatttcgctgtgccccagggctcggcgccattctttggtaggagcggctcctgccgcagcgacgtcgttttagagttgcattcttccggcaaaacagtctgggttgggtttcctagtggtctggtgtaaatttctcggtgcccttagctttgagcagcgccctgtgttctcagcgctgggcttggctagtgcgggagcggttgctgctagagggttgccttggcaggcgcctctcgcaccagctacaggtcacacttgtggatgggaaatgccttttgtgggctctccccctccccagacaaaacaaaagagcaccttccgttggagaaccaggatgaaagcacttagcccctgcctagcccgtgctgtgagtcctctccaggcactttgacttggcagggtccgtgtgcctgtgtgagggacattgcagggatgggcctgagcagggagtccaccggccatgggggatggagccatcgactttggggtgaggcagggaaagggctcccagatggggtacctggattaggtccattcaagccgcgggtgaacgtgggcccgctccacccaagccgtggctgtgaggaggctggagagaggtgagggctcctgtcccctccctgcatggacacccttgggaagtggggcagctggggtcccagcctgggtctggaggggtcccacccacagcacaaataggctcgcaggccacccggacgccacgggctgcgtggaggagaactggagtgcatggaccctgctctcctccccggctgccaggagtgtccactgctttctaagtcagactccttgggcaagaagtgttgccacagccgcccgtcgcatgggagaccggcttccattctatgcggagtccacggtctgctctgatcttgctgtgtggagttgttgtgtgcgtgaaatgcttgtgaccctgcgaagcgccctcctggcaagtcccctgcaggtgcggtgggtgccatgcaggagggtgctgagcttggatggaagcaggccctctctgcggcagatggcggctctcaggacgccatgggtctgcggtgtcccttacccactgggggggctcggcagcctgaggagctccctcttcctgatgcagagccctcactgctcactgccatggaggaggcaggagatcccgccggaccccgcttggagggctgggcctggagcatgcatgggtgcggggtcaacgcctcaggagacttggagcttgggagccccctgttctgggacacttgtggccgtccagctgctgccctgggaatccacacctggaaggtgggttagggagccatccttgggggaagctctgcttttgagtctgagaagtcgtcccaagttttgagggtccctgtgctggcttagaagtccatgtaaagcttgatgggggatgaaagtcagctgaggcctgccggtgataacggatgccttacacacaccgacttccagtcagcttgaggggggcttcatgcaggaggaagcgcatacgtgtggtggggtgtggggagtccctctctggatcctggtgggtttggcacgcggaccctacatggtggatgtgatggacagtgtcctcctttgggagcggggcctgtcctggtcctcttgtgaagggtgggggacaggcactgacctgtcaggagggttagagggttggcaccagcaggtggcctggagcgctcagagcacgcgcgatcaggaaggcccgagtctccagtgtgccctccctggccttgtgaagtcatcttaaagtctggcttgagcgcctctgacttggattctgggaagctgacacagcgcggccggggtcgccacatcctgttgagtagccgctgggtgctaggcgcctgggtggtagaccaggtgtcagggatagggcccatgcctggcctactggggagaggacagaggctcagaggggtcacctcgagcgcccaggccattgtgttctgctggcttccaaggcagcacacggtcatggaactggagagagaggtttatggaagattttatctggtacactggggaatggtaagacagggacacctggaaatattgtaggaaagtcacagagggaggaaggactcagcggagagaggagaaagccgcctctgggcagcttcgaggatacccaggactgtggccgggggccatgcagctcagagccaggcccatggcaggtctctgggtttattgggtggctgtggaaggagacatcctgagtggggctcctggctgggcccctagaggccgtgactacttgtacctgtgcagagtgagcacaaggcacctggcaagattgttggtcaggccagagagggccgtgatctgggggaggctgttgcagtgcggggagtgatagggaacctcatggggccgtgccggcctttctggggctctcttggtgcatttggagttattccgaggcaggtctcctgggctctgtcagcactctggcctggatcactctggggcaccgtgggcactgcagggtgctgggcagcacctttggcctccattcactccgggtcaggagtacccccagtcgtgacaaccacaaatgttcccagacatcacccagtgtcctgctggggggagagccactgtctgggagcatctgtgcttttggcctggttgcccctgcgctgggggccgctgctccttgtggtttatggcttgtcctgtgtcggctcctttgattcctgtgaatgggccttgagggtggatgtgctcctgactggctcgccttggctccaatggtctggagcaggccggtgtctagaaaggcagcagcatggaccctggcgcttgcccttcacacagcagctccccagtggcccagagctagcagcagcgcgcagcgtgcccagctgtgcttgtagccttggctctaacccttggctttgccagagagactgaggcacagaggagttgagggatgggcccggggtcaccccagggggtggaagatccggagctgggagtccacactcctccactgcccgccccgcacagagggcgctcctggtcaggcggctatgttcatggtgcgacccgtcaatctgaggttgtgctgtcttctgtgaactgaggccttttcccatccaggcctggtccccgtgacaccatgtcatgatgtcagaatccctgagagctgtgacagggcttttggcagaggccagtcattcgacagatgcttataggctgagcttccagcttggctccaggcgttgccaaggagaacactggtccgcctgggagggcggggctggcagggagaggatgagggtgaccacagttagcacccaggatgtgggcattcaggggctccttcagcacacagcagcgcgttccagttcacggaccgctcctgtgttctgtggaccccacaccctgcaggcgtgggctggagggggggcatctgaccctgctggggagagggagtccaggctatggaggggcgggctgggctcactggcctgaggcagtgggtgaagtggtcctggtttcccacctggtcttaggggcaggaaagtccctagaggctcttcctgatgctctggaagaagagaagggttccccacacatcagccgccactgggcctggacttctgcctcttgagattgtgcacggagctgagtgtgactggcggagcccagagccaggtggggtctgtggggaggcaggctcctcctggcttggtcccccggcccagcaggaagggaaaggtcgcctgccaactgcccccattgaggctgctggccccgaatggccgggctggccgccggtttttgaagcccactctggtgctgccaggaggtcagggctctttgtggtcagcctaggccagaggaagcctctgcagatggactttacgcataaataccgcacaggcacccgaatggcacgcagcaagcgaggttgccatccaaaacggcttttgctttaacaggcagaagagggtggctgcgccggccaccgtggattgagcacctgccaggtgtcgagctgcaggccctgggtgccaggcttgcagatcctgggagatgttcatcatgacctttgatgggcagactgcacgctggactccaggttgcaagggaagaagtggagctcgtcccacgcctcccccactaatgagaacaccccttttgggtttgtggggtgtgaggtctgtaggagccacgacttccagtgtcggagatgccgtcagctgggtgatgactctcccacccagcgggcccctcagaggcagggtgcaggagccacattgctcaccgaccccttcatctgcgtaggccagtgttgccttgccccgttaacgtcctcagtccacacgccgccagccaaggtgcaggctgagcaagcctggagctgaggacaagcggaccgccagccccgtagcaagcccacgagagccagcagctcctccttttggcctctgcccgcgcccggcttcctggactccgacgtttacttgtgtgagagttggttctgctgcctgggcagttgatggacagtgtctgggaggtgcctgcccagggctccgcatgtttctgatgtgccggcttctcactcacgacctggtgaggttggcagccaggagctttcttattttattgattaaaacatcctgagattcagaagtagggactttgtgccagggccctggaggcagtccctgccactgaagagatgaccctgctttccgggacttcccggaggcttctgtctgtagaccagggagaaggtgttcgccggtggctcctgagtggtagtaaaagacacatggacacaggaagctttagcgttagaagctgctctcaaatatctcaacagaaacacacagtgtggccgcgcgcggtgcctcacgcctgtcatcctagcactttgggaggccgaggcgggcgggtcacctgcggtggggagctccagacacagctatgtgaaacgaaagctatctgttgctgtctcagattccataaggactgagacttgtttcaaaagaaactgaaattctgtcttgttctcagtaatgaaagtcttttataccataattgtatatataacttctgacttacaggaaaattacaaaaattcccatatcctcttggccctgccagactcaccattggctgacattttaccctttggcacgtggtgcctcttgccccacccccagtgaactgtgtgtgtgtgtgtgtgtgtgtgtgtgtgtgtgtgtgtgtgtttagatggaccctcactctgtcgcccaggctggagtgcagtggcttgatcttggctcagtgcaacctccgcctcccgggttcaagcagtacacctcgagctcagcctcccgagtggctaggattacaggtgcgcaccaccgagcccagctaatttttgtatttttagtagagatggggttttgccatgttggccaggctggtctcgaactcctgacctcaggtgatccgcccacctcagccttgcaaagtgctgggattacaggcgtgagccagtgcacccatccccactgtgtgtgtttctactgaaatatttgagagtagctggagaccgatgcagtcccctttatgtgtacactgagatatctattgtttcccaagaacaatgacattctctcacatgaacacagcacagtgatcaaaattgagaaagtggccgggcgcagctactcacgcctgtcatcccagcactttgagaggccgaggctggtggatcacgaggtcaagagattgagaccatcctggccaatatggtgaaaccccgtctctactaaaaatacaaaaattagctggcgggcgcctgtagtcccagctactcgggaggctgaggcaggagaatcgcttgaacccgggaggcggaggttgcagtgagctgagatcgcgccactacactccagcctgggcaacacagcgagacaatttttcaaaaaaaaattgagaaagtatttattattttttaaaattgtatttgagtattttttatttttttaattttatttaagagtattttttattttttttttaattttatttaagagatgagatctctgtcacccctgctggagtgcagtgacacaatcacggctcactgcagcctcgaccttgactcaaacgatccttctgcctcagcctcccaagtagctgggactacaggtgcctgccaccacctggagtctcgttacgttgcccaggctggtcttgaactcctggcctcccgtaatgctgtgattataggcgtgatctgcgcccagctgagaaagacagtactgataccaggttatctaacccccccggccctgtttcaggtttctcagctgagcgtttctagcccttcccccttaatacacaatttttgaaatttaaatgaagaccgaaactggactggtctgacgagttccttctgccagtgaggtgggggtggagggggtactgggctgcttggaggacacctgcctgttacctggctgttgggtgggtgcagtgctgactacaggctgctgtttcttcaagtgacttggatttggtttggttttcagggttttatgtgtgtgtgtgtgtgtgtgtgtgtgtgtgtgtgtgttttgtttttttttttttttttgagaactgcttgaactttaattccaaaggattgtgtaaatgagcatttttccggtcggttccagccaggcttgggggcccttccttcatggggtgggggctgctgctggctcctgctgggtgccgggccctgctggcagggatgtgggcggggctggccctgactcagcgcgggcacagcctatggagagtgaggcacagcctatggagagtgaggcacgcggaggcctcgctcctcccacggtctctaggcctgacctcaacgctccctggcctgattgcgaagggtgcgtgggagacgtaggattttaagttaatgaggcctcaacctaagcctgttgctgttgcgtgatcagcatggttttccctgaaatttgccttttcagatctcgtctctaagggtcaggaagcacagggcggctggcacaccccgcctctaattcttcccgcctcagccctccccaccgaagaacggggctggggggttgcttgttgacgttttgaagacggcagtgggtgcctttcctgtggtgggaacatgctttgtttttcacacactaaatttaaatcagtcgttcttagggaaaaaagaaggaacagggacaagctcctggcggttggctgtggcagacacttcaccaggggctgactcgcgggggctgagtgtacaggccccaggtggtggttgatgagaggtgatgagtgtgccagccaccttgcaggggtctttcctggcgagctggcaggagcagggaggagcacgttgctcctgctgctggtggggcagtaacgtgttcaacctgacagcgacgtttttgctgaaagccgaagccaagggtggtgtggttggccgtcagggatacagggccccgcgtgggaatggtgctttcagtgaggctggcaggattcttgcggctcaggtgggagctttggcctgcacggtgttttgctctctggagaccaagggtgatgatggtgctggcactgagtcacagctgagattcagctcagggacttcatttctgaatgcgtgtcctctttcccagggaaagcaggcaggatgggagagtcgccgatagaaccacctcttccctgcctcctgggcttgggggaagcttgaatgacatctaaggccccgtgcctgggtaagccttgtggtgtctcagacatgcccagtgggtgccatggctgactcaaggtggcacagtccccattgggagttggcacagtccccattgggagttggcacagccaaggccctggggccacctggagcggcagtgaggtggaaaggtgagtgggcccttgggcgtcgctgcagggtcgatggcggacgccttgggagagctccagctcttctgcccggaggagacagccccaggacgggggtggcgcgggtctttggtgggggcaggcaggaagtgccagtgctgagactgaatttcaggcccttctcatctgccaataagagacagccccagaatgggggtggcgcgggtttgtcgggggtaagtaagtggggccagtgctgagactggagcttcagggccttcaccttcatctgtgggcctctcgttagttcgtgagtgcaggctcattgggaggcttctgtctgtgtccccccacccccgccccaggctgtaattcagaggccgtgtggcataggcttctagtttactgtgcatcatttcagatgtagacttctacattctttttcctgattataaaatactcgcaaaagctgtaggaaagcgagcctgtgtcccacttggcagcagtgcaggtgagcgtggtgccgtcaccactggcctgtcccaggaactcatcgcccgccacgcatgaggtcagcgtgcggctctgtggcacggtcctctccccatggcaaggattgggatcatctttcatgtctgcagacagcatgggcgaggctgactcgccattgctgtgagctttgtatgccgtcacgtgcacaaggacgtttgcgtcagctgcttctgtggtttgaattaagacctcagcttggcttggatgggggcatttctaaggcgagcgctgtcttgatcctgaatgttttctcattgaatcgcaggaagctcttcgtgggcggtcttgactggagcacgacccaaggtaggtggggaaggggtgtcaggtgggtactgcagatgggctctaggacctcggccttcaagttgtgtctgcccgcctcttgctactgtcttggatattttaaagtccttttgacgttgttctgatttctgggcaggggacagagtaagtgtgtatttgctctgagactgttaatttggtatttccatcccaagttacagggaagacctcaggctgcaggttcctagctccgggctgaggtggcttgtggaggcagacagctgttgtctggaagtgcagagggctgggggctggccaggctgttactgagttcagaataggaggaaagagtgtgtagcaaagtcggcgctccttggccactgccagcattcagagttgtcttgtttgccttgccttaaacgttgccttcctggacgcctacaaagtcaggttgtaaccgctggccactgctgtgctcactggcagcccctgatttacgtgaggacctcaagtgtgtgttgggcagaattc

SEQ ID NO: 7 - DNA, 162085 bp, Homo sapiens
aagcttgtcagtgacatctgaagttgacttgaaagtgcatttcaacttgatcttttctccaacataacctcggacatgggcatctgcacgaatctccaaggaaaagacgatataaacacctaatcaaagcaaacccaaacacttaaaatgcattcatgtgggtggaatatacagatgtgagtgaacaattatttttagagccctcatcaaaaagccagagcaataaatattaacaactatcttctcaggcaagcccacaagggacaaggagttgatatctgcattaatcaaagatagcatttttcaatcattttctaatcttaaatcacaactgaatgcttgtgtaaaaatttaaaatctggtcacaccagcgttttcccgaatacaggcttgtggttcaattaagtacaaacaatgggtctgcccatggctggctaaaaggcaacatcacccatccccttccatcccccgcagacacacacacacacacacacacacacacacacacacacacacacacacacactctgggaatatggcagcttttgtggtctaagggacttaccccaagtatagcatggttgcatcatgaagctaccattgcctcatcaacagcaaaatgagaataggaagtaagaatgggagaatttatttcaaataattttctaaaactgcccccaaggtactatctagtttttccctttttcttaaagctggctgaggaatcacacatccattaaaagtaaatcatggagaagaaaacagaataggtaaatgcattctagcaagtaaaaataaggtaccattttaaaacccactagagacttacgtcttccaaaaccactcatttatccaactctgacacttcatctctctgaaaagggctggcactttgttctaaccagttccttctgctttcagagaacaaaaacttatctttccctacaggggcatattttaggaaatgacattgccagtactttgttcttcctgcttccttatctacctcaagaagccatgaatcttctgctggccaagataaacagagcagcaagatttcagaaaagtgcaaacccacacgctgtcctgaaaatcggcagtgcttctggtacaggcagaatggtgttgtgattgagcacgcaggccacggctcctacaccagagggtctgggttcaaatcccggccctgtcacctgctggctctgcagccttagtaagttaccgtacttcttcagtcttctcagcctcatgggaatgataataacagtacttacctcagaaggccactgtgaggattaaaagagttaaaacacatacaacactaagaagcctacccgaaccagagtaagtgctcagtgcgtgttagacagtgtcattgtcattattgccacctcttcagtcctgcccacacactctcaacctttcctgtcacagttatgagtcatcagttccactgcctctacctctgccagctttgaatcatttttcttgctcctctctagacaatccagtctgttgacattccttttaaaaggaggagaccaaaactgaacccactaataagaactcataagaatctgaccctcccaaagatgaagattacttctggtctgcctatggcaccctttccgactttgccatgctaaacctgtcctgccttctgtgcctttgcaaatgctgtccctctgctggaaagcttttatccctcagtccccactttcttaggccctcaatcctgacccatcactgtaagaaaatccttattcatcactcaagatctagctctaaaaactggaaggtggaaatgaatggacaatctacactctccccatgtccattcctttatcctaaaacataagtataatattgagatttgaaatacagatttagaattagccaaagctggacttgagttctagctcagctactttctggttgtgagaccgtgatctcggttacctaaccagttcaagcttcaatgtcttcacttggaaaatgggaataataacaagatctacttcactggatcactctgaagagccactacaatcaaaaaagaaaatttttcattttgatcatgttgttcatttcacaacatgaaacgcttggcacagcatctggaataataactttaataaacattagctattattattaaaatgaacaccacacatattcaaaaactttcagtaatttcctattggactacaaaataaaattcagagagtggcaatctagccctaaacttctgtcactgcatcccatctaccttcccaatcccttcatcattacttgaatgtcctgccatgtcccacatgtactgtgtcctttcatgccactgagcctttctttgaacaggtctctgtctgaaaggctctccccacctctaataatcctgcctgggttgttccccaccacaccatatcccaacattcacacaccttcaaattccagctcaaatatcggccccctttgcggtgccttcccaaattccctgatgcggttcatcgccctttctcctcctaacactaggtacataatcctgcacaggcacagatgccatcgattgcacctagttacaaaggctattcctctattaaatgtcagcaccttcagggcaaaaattcagagggaggggagcaggcagagggacactgagagaaacaggtggacaggtcaccagaaattctagtataggaacaaagcatgcttgtaaatcacccactttattcctatcaccttttttatagtacatgcaatactcttaactcccctacactcctatctttccattgcaccctttcagaaaaagctcagctctagacgaccagactaggctagttgtgaacaagaaaaatcacacgactggacaattaccataagaaatgcgtgaatatctcccacagctgagtcctcaacgaggcctggcaaacgtttaactggccttgcttagcttcccattccatgattcctcaagcccttgtcattctcccttagtcctccatgcaacctccaaacccctcattctcagaagaaaatgttacctcttacatcgtcatgaaactcgaggccatataaacggcccaggcacacacattcctgcatctgctcccatccttacttccaacctgaaaggatgtggtgtcccttttcctatgcgaggccaggtcctctgctctgcctggattcatcccctccattccctgctttagcagaaaaacctctctaggccaggcgtggtggctcatgcctataatcccagcactttgggaggccgaggcagggggatcacatgaggccaggagttcaagagcagccggggcaacatggcaaaaccctgtctctactgaaaatacaaaagaaattagccaggcatggtgccacatgcctgtagtcccagctactcaggaggctgaggcaggagaatcacttgaacctgggaagcagaggttgcagtgagctgagatcacaccactgtactccagcctgggtgactgaacgagactctgtctcaaaaaaaaaaaaaaacctttctactgccttcaacccctccccttcagcctctaaatacacaggtttctcccatccttaaaaacaaatagcaattttaaaaaatctttctttaacgctgtaatattactctagttaccaactactgccctttctctcctttctaagccaagtttgtgaaagagtggtctacacttgaggtctccatttccttcttcccattcacttatggaccttatggtacaactgaactccactaccacttctggtaaaaggcatcatatatcttaaaattgtaaaatccgagggataaaaaccccagtagacacttttctatacttattttactgggtcctctaccagtgactctttgctccttgaacttctctatcccaaagcttgcatgacaatgctctcattcattcactcattcttcaaacatacatttcttgagcatctcttttgtgccatcctctgggtttggaattaaatgcaagcaaaataaatacactcccttgtatacttgaaatacagcagaagtttgatacattaattaagtaatcataaagacaaatgcataattaacaaacttggataactactatgaaggaaggaaaaagaaagtggctatgggtacggcccctgttatgatgggggagaggagagtggttaatgaaagcttccctggaagttactcttgagctaagatctgaagaaaaaggtaacaaggtgaggagagggagggcattctaggcagaagacacagcacatgcaaaggtcctgcaccaggaaggagctcagtcagtcaaggagctgaaaaggagtatgactgcaacacaaaaaaacacgaaagggagagaaaatagaatgagatgtggctgggaggtaaacaaaaaacagaccaggcaggaccttacagatttgggtcctcatccttagtgtaataggaagccatggaaagtacttaactgtgggactgggcaagaagagacctgatgaaatctgcattcttaaaagatcactttaggctgggcgcggtggctcacgcctgtaatcccagcactttgggaggccgaggcgggtggatcacgagttcaggagatcgagaccatcctggctaacacggtgaaaccccgtctctactaaaaatacaaaaaattagtggggcgtggtggcaggtgcctgtaatcccagctactcaggaggctgaggcaggataatggcatgaacctgggaggcagagcttgccgtgagccgaaatcgcaccactacactccagcctgggcaacaaagcaagactccatctcaaaaaaagaagaaaaaaaagatcactttagagaagacacttacaaggaatcaagagtgaatatgggtaaattcagcatgttggcaggcagaggtgggtggatcacctgaggtcaggagttcgagaccagcctggccaacatggcgaaaccccgtctctactaaaaatgaaaaattagccaggcgtggtggtgggaggcagaggttgcggtgagccaagatcgcaccactgcactccagcttgggcaatagagcaagacttcatctcttaaagaaaaaaaagaaaaagtgaatgagtgaatatggggaaattactgaggaggctactacgatagtccattaagaaagaagggaagtttgaactaagtatggctgtggaatgttagggaaagggaggtatcaaggatgactgtcaggtttccgacttgctgatgtcattcactgagacaggaagactagaaaagtactaggcttggcaggggaacaggagtttgattctggatgcatttaaggtgcttctgagatacccaagggataatgtcaagggagcagttggtttagggcaaaggtgagcaaattatggcccatgagctaaatggaagcaaatggatctagtggaaagggaacaaactaaaaacaactagcaactgaccttgccgctagctctgggtgtgaccagattggcctaaatcaattatgacatccagtggtcttttggtaaacagctaaaaaacatttacaatgtcttttaaaacaaagttttattagaacacagccatgttcatttgttgatgtattatctgtggctgcattttttgcagaattgaatagttgcccccagagaccatgtagcccacaaagtctaaaatactctctggccctttacagaaaatgtttgtcaacccttggtttagaacaaagagatatgggttacaatttaagattagaatctctttagtttccctccaaccaactccaccactgactgtgttacacatacacacacacatactcactctatctctgtctccccacatctctgacagtatgtatcaaatatctaatgctattcttttcttaaccattctttaaacactggtgttcctcagagctccagcctgaatatacagtcattcaacatgttttccttggacaatcctattcacttgtagatttaacaaccactaacaggataatgatttcccaatctatattactagccatgatctgcctctgagtgttcaagtgttaccggatatactctcttgaatatcacccccacaggacctcaaatcgaatgcggtaaacatttgtttgttgccagctcaacatccatttcccctgatctcctaataataccctttttttttttgatacctaccttttcccacacagcctatgagctaggaggaaatgacactatcagtcaggatccaggcaggcaatggaaggcacaatcagctgagattgtgaaaagtgtatgggccacttttcttttctttttttcttttctttttttttttttttttgagacagggcatcactctgttgctcaggctacagtgcagtggcgcgatctcagttcattgcaacctctgcctcccaggttcaagtgatcctcccatctcagcctcccaaatagctgagaccacaggcgtgtgccaccacacctggctaattttttgtatttttggtagagacggggtttccctatgttgcctagtctggactcaaactcctgaactcaggcaatcctcccatctcaacctctcaaagtgctgggattacaggcgtgagccaccatgcttagcctaggccacttttcgaagggacttttcccaaggttaaggaagctgacagcagcacaaagcttttaccatccccaggtctgaagggcaaagggaggaaatggtgttactagatcctggtaagagtgggagctgtgggcaacctgacaggggctgttgttagagggatacaggtactacagatcatggcaccaagagagggagggagcaggaaataaatatcctgatctctctcctgccctccaatctcctgccaatgcctcccgttggccaaatataactggaaaccagaggaagagagcctgaatgatgtactttatacagttagctttccaaagagtagagtagagaaaagaatgagtctggtgggaggggagaaaactaaaagtaaacagcaactgactttactgccagctgaggctgactcagatttacctaaaccaatcattacatctagtggtgtcctggtaaacagcagaacatttttacaaaaaataaaaggtccacatacatagggttggacaatttctgtggtgcaaatactcctaccatggtcaatttcaagctacacaggttaagtccctaatgctgacataggaagaggtgtattaatacttaattggcttttgagagccaatcacatcctcccaatcataaagataggtcaatatgtgatctaagctaatccaatcaaagcgagtttcagaaaacctgcttggaaagttatttaatgccccccaccccacacccgccttgtttattttttgttttttttgagatggggtctcactattgttgcccaggctggtcttgaattccttggctcaagtgatcctcccatcttggcctcccaaagtgctgagattacagtcatgagccaccatgcccggtttatgcacctctctatgtctaatattttcttcactccctatctctaacaaacttattcctctttcaagatttaacttcatctccaggaaatctttcctttattctcatgccagatcaaagcatctctctccatcctcatggtttctaatgcatttccctcttagtatcagactctaaaatcatctgttgacttatgtcttctccaatagatcctgatcccaccaaaacagagcctagcatattgtggatgtttagtatagtaatatttattcaactagaccaaaccaacagtttcctctttttttttttttttttttttttgagatggagtctcactctgttgcccaggctgcagtgcagtggcgcgatcttggctcactgcatcctccacctcccgggttcaaatgattcttctgtatttttagtagagacagggtttcaccatattggccaggatggtcttgaactcctgacctcgtgatccacccgcctcggcctcccaaagtgctgggattacaggcgtgagccaccgtgcccagcccagtttcctttttataaaacaaaaattattacaaaataagcattaaaattacacattctggttactaaattatagtaaattttggttactaaaccaaattctgtttgctaaattatagtaagtacgccatcaataaacccacctacctaccaatttttcccttgttaatatatctgaactccatatttatgagcatgattttgccaaaaagttataaacatttaaagtcattttgttgaaatctaaatactggatatgtggggtcttaattgtatagttaaagaaaaataagaaaagtaatagtttatccatggatgaactaaaattcagggctggtgaaaaaaaaaattctaaatgacgataattttgtacagtcttatataaaactctgagaactagaagaaattattaacttttttctttttcttgattttttttggttctaattcacttgtttattttgggggaggaagactttggtatggagcaaagaaataccaaaactactttaaatggaataaaaccaactttattctttttttcccccgtactggtagataaagcaaactttataagtgggctattgaaagaaaagtgccttttaaaagtgtttagtttcccagtgtccttccaagcttaagatacagaagcatttgttcaaaggatagaaaacatctaaaagtttaggctcaagatcaatctttacagactaatattttcggtttgttttttgtttgtttgttttttgagacagagtctcactctgtcacccaggctggagtgcagtggcgtgatcttggctcactgcatccatggatgaactaaactattctatactgttagacatcagggtgttgactcctttttggggagaaaggataatgactggaaagaagcacaaaagaaggcttttggaatgcaaggaacattttatatatcctgatttgggtgctagttacccatgtgtgttcagtttcttaaaattcattgagctgtataggcttatgacatgtgtacttttctctacatatatatactgaaattaaaaaatgttttaaaaccaatggatgtaagacagtttgtctcttccactcataaaaaaaataccaatccaacattaattcactcagaaatgtccatcccaggcctaatgcctttatctcttcatctgagcagaaaagcattcttgccaggtaaaaacagccaactatagaaatactcataataattaacaaaaactttttagtctggggaaaaaacaagaaaatcacattttcacataagtaattttacacatgaaagaattaaatgtgtcaataaagcccccaatcttgtatgccccattttctaaaatacaaatctactgatattttattcatattgcacacctaagtaaaagagagaaaagtttaagaaacctaggtcccctagtctaccatttctaaatacttagataactgatatagcaggaccagacttataacttaaggagaattcaaataatctaataatttaagtggtcttatctttgaaaacaaaaggcaaataaacactgacatgaaaccaaactcaaccacataagatttaaaacaccaaacaaatggatgaaccttgaaaacatgcaaagtgaaaaaagccagtcaccaaaagcacatattgtgtaattccatttactttatttttatttatttatttatttatttattgaggcaggatctcattccatcgctcaggctgaagtgcagtggtgcaatcccagatcactgcaactccgacctcccaggttcaagtgattcttctgcctcagcctctcaagaatctgggataacaggggcatgtcaccacacctggctaatttttttttttttttttttttttttttgtattttttggtagagatagggttttaccacgttggccaggctggtctcaaacttctgacctcaaatgatccacccacctcggcctcccaaagtgctaggattacagatattattctatttatatgaaatgtccagaataggcaaatcaatagatacaaaaaaatagactggtggttgccaggggctaagggaaatggagagtgaggagtgattgttaatgggtatcaagtttctctttggggtgatgaaaatgttctaaaattgatagtggtaattattgcataactgtgaatatactaaaaaccattcaattatgccctttaagacagtaaattgtatggcatgtgaataatatgataaaccagttgtttcttttttgtttgtttttgtttttgttttttgagacggagtttctctcttgtcgcccaggctagagtgcaatggcgagatctcagctcactgcaacctctgcctcctgggttcaagcgattctcctgtctcagcctcccgagtagctgggattacaggcgcccgccaccacgcctggctaattttttttgtattttttagtagagacggagtttcactatgttggtcagcctggtctcgaactcctgacctcaggtgatccagctgcctcggtctcccaaagtgctgggattacaggcaagaaccaccacaccctgccaccagttattttttaaaaggcaaaaaatctattccacaagtacatagagattgtaaaatcaactttaaatgtttgattgaattatatggtctgctggacttgacagatgctcttcaaagcaaaatgacattagatttaagaaaacaccatttccagattttttttctcaataagacaatatttgaatatttctcgtgtgtgtgtgtgtgtgtgtgtgtgtgtgtgtgtgtgtgtgaaagagagagagagaggactgggtttattaggagtgacagtaggccagcctaaatatcatactgcaaagtaatttagcttaaaaactggagacttatgatgacacaggcagctgggagggatcgggggtgtgctggcaacatgaatattagtcaccagttaaaaactttccagccttaactgctaagatttaggacatctgaagtctttatattaaactatttatatttatataatattaaatatctctttcagaaatccccattaccctcaaggaaattttataaatttagcaattcactctaatactagatatactaatattttatttcccaggaagacacacatacacaaaatccaggaaataattgtaccttaagatgaaggtaattaggctggattgaaatttatgcaatttgaaaattatatgaaagcaaaactcacctaattttaagatgtgaatgtcagtgtgaataccctacttctgatattacttaataaattttaacagaatttatatgctctttcttgtattaaaaaaagttatgaaaatgctaaagcagttactttttcatcgatatgcttctctataacgaatcacatcacatcccttctgtgactagcaaatatttcattttatagactacaataatcacctacaaaaaataaaattaccaactgtcatgattttgtttcccaaaactactggggcaaactactgaatgctagaactgttttctttctaatcagggtatacagcgcccaaacgacagcggtcaaccactgataataacaccacaaaataacaccgggtgcccccaaagccagagctctttgtggttccatcaagtatgctatcaccaaactacaatgacaggtcacgcaaggtgaaaaagctcccaaagctcaggaaaggactgacaaaataccaactatcctcaacggggtggtgatgacatcgtcccaacgtcccgctccctccctccttccttcccagagctatgcgggggctttctggagacccccctacccggaaccggaaaagcgaccatcttccctaaccccccggccggaagtggagcgtagccagccggagcactcaccctggaagaacaggacgcccagcagagggaagagagcgcagccacggcttccagctgctcctctctgctgcatcccggcagctcttcagatgcttgcacaccttgtttacagctcccggtaacgacacaggtaacaccggaagtgacgtcagagcaggaggccgagagacaacttaaatggcgatccgaagttaccataggaacctggcttctttccagaaccacacctggtttcactgaccagagatttattaactttcaggcgggagctaaatgctctcttttgcttgaaaatgaagtaggctacggacttggaataattacaattttgtttttatggaattctgcagaactaaataattttgatgctctgactgcatgtcagacatcgtttttacgtctcgagatttagttgaaggttctcagaatacactactgtaaatttagagttcagaaacacctgggagatcatacagtatagataaatatatattaggtgcttgtagtgatatgtgccacaagcctcattggttggtgtcctttttagtgtaagtattgcagcctccaaaattgggtgtttattaaattacttttggcggtggcaatgatgatcaaatcattacagcctgtattagaggaaaagaggaactgggatttctgtgtctttggttggaaaagtaagaaagttatgttatcacagtacttgaagtgagatggcgtcacatacttctgaaaaagagatggtacaataagtacactgctttaataatcagtaagcctcttccctggaaattgccacatgtcaatgaaagcaggaggagaataaaagtatgctttcgctttggggaagaattaataagtttccatttttcaatttccattcctttactagacttgaaagccagtagttttccctattaaaagtgtaatgcaaagtactaaatagaatctttgatacttttctttgaaagagccctcaaactaagtagtgttgttatgcccaattcccagctatccaaaacagtgtgaaaattctgtggaaatccgtatacttctgtttacccattagaaactaactgtatccattattgacttgcaggttgtctctactaagaaaactttttggtaaagattaaatatatatccatctgtttttcctgcaatgtagaacttctagatatgtatatacacaaattatataactgataattctttattactaaaggtttatttacatagtgtttaaagcataataaaaaataaattacaatacaaaagtgctctttaggaaggagacactaaacaacaggcccatattaccccttgactatttagccaagacataagctacaaattttgccggaaaaactgtccatacatttttaactacttcttcattattcttatggaccatcatccaggacatctgtttgaagaaatatccagttataatattttcaaaggttagaattgtgaagaaaaaatataaaatgtgattaaaggatatatagccttcagatgtaatttacagttttaaaattgcactttaaaactttgcttttttagacagtataaaaggcagaatgagacagatatgtaatgaatttcagaactgaggttcatatgtaaatcatacaattttttaaaaaatagtattggaaaaatatcaaggtctatacatttaaatacagataatctgtttgaaaattccagtttgttaaaagaaaaaacatctgcagtccagtcgattaaaaactgaaaatatcaatctgtaaagattgatcttgagcctaaacttttagatgctttctatcctttgaacaaatgcttctgtatcttaagcttgtaacttttctttcaatagcccacttataaagtttgctttatctaccagtatgggggaaaaaaagaataaagttggttttattccatttaaagtagttttggtatttctttgctccataccaaagtcttcctcccccaaaataaacaagtgaattagaattaaaaaagaaaaaaagttaataatttcttctagttctcagagttttatataaaactgtacaaaattatcatcatttagagttgatttttttcaccagccctgaattttcaaacttgtaatatgctgtttcacaatttttttattaaattacttaatgattccagtctgcaaatgagcatagactttgctctgttgttatagatcattgaattgggggggaaacatagtaagctaaactatccgtcactgctcatgaaagacccacattgttgattatttttcccagcacagaagaaaagtgacaagtgattcatcctgcaatggcctctgccaatcttttcatatctatgtaaccttttgtagttactgtgtgatttagcgttgtgctattgtaaatcttggattaattaacaaaacaacaaaaatctatcacctggaatattgaaagaaattcagtaaaacaagatgtgtctcatagttaaggagagacataaaaataaaaatgtcatttaacagtttgaatttaggatttactgttaatcagaaacaccgaggaggcttagctcaccttttaattgagaatgtgggaaggaaagagagtaaacacattaactttagtagcagaagtgctgctaaaagaaatacgtgaaaggaaatgtaacagacaaattggcttttatcccttttgataccaatatatgtgtatacaagtcataacactgtaagtagtgtcttaagggcaaaaatgtagcttcttgtttataaaacctaatgagcacttgaaaaaatttacactctgaaattaaataagaccttaataatgaggctgtgtatgactggtgatatggaggagcactgtgctggctccagaggggtgttgcttgtctagaatctaatatgctgcagaactggttggaaaacgggtcacaactggaaaagccaaagaaaagtttccattaacttcaagaaatactagggttcttgttcttggaaatcatctcagcttcctaaaacacaaaacaaaagtttaaatggataatatatttgagaagagtacaataggaatacttggcattatgaattacatatatgttattagaaggaaaatattctgagggaaagtattcatattctcccccaatttaatttttaaaagaagtttcctaatccttattacataattttcagagttagtatccttaaatcatggcctctaagtaccttgcatggacacttggatgacccacaacttgttcacacacatacatcccatattctccccacttctcactctcattacaaacaaaatcagacatatagaaaagtagagaacagagtatgtggaatttacccatcccttaaattcattaattcattcttttcttttcttttctcccctcatctcccccatcacctaattctgaagccttttttgttttatttgcttttttcctatgcttttaaagtaaattgctgacatttaccccaatactccagtaagaatttttcaaaataggtacattttctttataactacaataccatcactatacctaatacaaactaacaataattccctaatattatccatatatttaacattttcatattcaagactttcccaattgcccctccaagcttgtttttacaactagcttgttcacactattattcatccagttggggatcacacattgcactttgattgtgttcatctcttaagtttcttttgatctaaaacatctcccatatttattttccatgaccccaagttgttagataatccccttaactttaaaaagacaatagccgttggttggtaaaaactccctaatgttaattttggttttctggttttacaatacaatcattttactccatattctattttataaatccttgaggtctttcactggagctttagcctataaaaatgtgaccctctttgcaactaataacggtctgtaaaaaatgttctcccgtgtaacagagccagagttttacaggataaagtcattaatatcaagaactttcttatgagcgtaaaatttaagtttgcatgtccggatttataacatctagaaattaaatgtgtggacctatttcagagaatgggagaaattctgagcatatgaaaaataaattggcccggcgcagtggcttatgcctgtaatcccaacactttgggaggctgaggcaggtggatcgcttgagctcaggtgagaccagcctaggcaacatggggaaaccccgtctctacaaaaagtacaaaaattagctgggtgtagtggcgcgcacctgtggtcccagctacttgggaggctgaggtaggaggatcacttgagcttgggagggagaagttgcagtgacccgagatcgcaccactacaccctagcctgggcaacaggttgagaccctgtctcaaaaacaaagacaagaaaaataaattatcctactttttaagcctgatgaacctgaaaactggaaaaataaaattatacgctactaaaactggattcatttcatgtagttattagtgccaataactaaatgagaggagttgaaatcaattccaaatagtacaaaagctctcctgtaaaaactgccagatatgtctattgagtcactctcttaataccataattggtttacaattaaaaaaaaagaataagcagatactaatcttttgatttaaaaaagatttatttacttgttgaatatttattagtagtagtagtaataaatataaccccgaagccacaaataaccttaggattctctcagctttaatggcagtagagtccagcttcttaatcttttgcacaaaatacactcaaggaggagctatccataagactaatagaagacttttgtctccctgacccagctcctctaatttcatatgggaaacacctaacagccataaagtgatgatctgggagtcctcattagagatgggctggacatgtcagaaagctgaagaaagaaatcaacctatttgtgaaccttaccatctaaaattgttagtctgtgtcttctaaataaacagagacctttttctcttggttgagcctttcctcttcttttctgtaacaagcagaaaccaaatgtcaggtgaacaagacaagaagcaagtgggtaaatcccacagaagcttcaggtaaggtatttttcccccatatttttggaagaattacatgcacttgggagtagattgaagtttacacagagctaaactggtgccatctaattaataatattcacacctctgaacttagagacttttcagaatgtaagggaatacagtttgggttctgattcgggaactccagagttttaaagcagacaccttattttaccattagtatcccacctctaatttatatttgttattcaaaaaaaaaataaaaagttttgtgttgacctaagtcatctttattggttctattcaaactagaacctcagagttgggtttgttaggcttcttaaaattagttctgtttcgccaggcgcggtggctcacgctgtaatcccaacactttggaaggccaaggcaggtacatcacttgagatcaggagttcaagaccagcctgaccaacatggtgaaaccccatctctactaaaaatacaaaattagctgggcatggtggtacatgcctgtaatcccagctacttgggaagctgaggcaagagaatcgcttgaacccaggaggcggaggttgcagtgagctgagatcatgccattgcactccagcctgggcaaccagagtgaaagtctgtctcaaaaaaaaaaaaggctgtttatttcattaaatatttattaaggaaatgagataaatggtgctggaacaactagatatccacatgcaaaagagtgaatttggacttctgcctcagccatatacgaaaacgaactcaaagatctaaatgtaaaaattaagactataaaactcttagaagaaaacatagccataaatcttcatgatcttggggattaggcagtggttttttagatgagacacaaaagcactagcagcaaaagagaaaaaataaactggacttcatcaaaatttaacttttgttcttcaaaggacactatgaagaacatgaaaagacaacccacagaatgggaaaaaaattgcaagttgtatatctgataaggaactagtatcccttaaataactcttacagttcaacaagaataagtgaaataatgtaccccatattaaaatgggcaaactctgaatgtatgcatctccaaataagatatacaaatggacaataagaacatgggaagatgctcaacatcaagtcattagaaaaatgcaaatcaaaaccccaatgagataccacttcacatccactagatggcttcatatagtttgggtatttgtccccgcccaaatctcatgttgaattgtaatctgcattgctagaggtggggcctggtggagggtgtttgggtcatgggagcagatctctcatggcttggtgctgtcttcaatagtgagtgagttctcacaaaatctggtcatataaaactatgtagcacctccccccaactctctcactttctcctgctctcaccatgcaaaattcctgctcccattgtgccttctgccatcggtaaaagctccctgaggcctcctcaggagccaaccaacatcggcgccatgcttgtacatccacagaaccgtgagccaattaaatctctttataaattacccagtcttaggggtttttttatatagcaacacaagaatggcctaatacacggttatgattaaaaaaaaaaaagacaatgagtgttgaggaggatggggagaaatcagaaccctcatatattgctgacaggaatgcaaaatagtccagctgtttaaagacagtctggcaattcctccaaaaactaaacagagttaccataagacccaacaattccacttttaggagaattaaaaacatatgatctacacaaaagcttgtaaatgaatgtttatagcagcattagtcacaacagccaacaagcagaaaaaacctaaatgcccatcaattgaatggacaaacaatatgtggtatattcatacaatggaatattatgcagtcataaaaaggaaagaaatactaatacatcaacaaggatgagccttgaaagcattatgctaagtgaaagaagctgggcataaaagaccacatattgtatgattctatttaaatgaaatgtccagaataagcaaatccatagagacagaaagtagatgagtagttgtcgggggctggtaggaggggataatagggagtgatagctagggatatggggtttctttacgggagggagcttaaaaacgttctgcaattagtgatgattgctgcacaactttgtgaaaatgaaaaaggtaaattttatggtgggtaaattttatctcaattttaaaatacatttaatgaacacctgctatcagcacaacagactttcctaagccctgactcatagtggccctgctgactgcctagcccagtggtttttacaaatgtatgcttcactttaaacataagggattttttagaaaagctttacatagcacatttttgtaaaatcaacccccccacatagtaaagaaatcccataaggaaatattttgtaaaattaagaaagcttttgtaaagttactagttcatacctgatttatctgtcctgcaaatgtgaattcttttatataggatttacttaaagggaaaaacatctgttcagcaactatttagcccactgcaaaataccaagagtcgccataagagtgttagaactttcccagaactgcccagccttacgattttatctccaccactttatgagctctttcggcccatcgctttttccggtaatgctggaagaggaccactacaattactattatgatcatcagtgcacaggcagagccaatggccagagccaggaagtggatctcagagaagcgtactgtaaggagaaaaagattaaattaggattctaaaaagaagaggactacaatgaaatctaatgacataatagggatgcatttaatcaatagatggaatcttcctttatcctacctttatgcataaaataatatattaccttgtgaatcctactagcaataggaaaaccatacacatactttaatggttctcaaagtgtggtcttcgaagtaacagcaacaatatcacttgagaacatggaaatcttaggccccaccccagacctactgaattagaaacactagaggtgcggctgagcaatctgtgtcttaacaggtcctccaggtgattctgatgcagctttgaaaaccactgggtgggttgaactacttatggggtaaggtttttgctaacctcatcaaacgtagtgcccaacccatttctccctgacttctcaccactttcactcagtcagttatttattcagatttattaagggcctactacattcctggcactgtgatagaaatgctgagccaaaaaagacatcaccttcaaggagctcatgccactgagaggataggaaagtaaatcagaagctacagtctagtggataaatgatggaaaagggaaaccagagggaaggtcccctaagccacactagagtctgtgaaccctggttttcttgtcctttagctttatttctgattatacttccataagccctcagagccagaaaggacattagagaatgtctagcccaggattcccagccttgactccatgaaggaggatggggaagaggatggaaggtagtctgcaagcccacagaatccaagtctcattttgtatgtctccactgttttatgggaagcagggccatggcttttatttgattctcaaagaataattatccacatatatttaagaaccactgattttttgtgtgtttaacctcttcattgtgcagatgaagaaactgaggtccaaaaccattacattatttctttcaatactcaaatgacttctgcaaggtcacacagccctctattggtggggcattgagaaatggttttaaactgtactatgaatgaaaggaaatcgtaccactgcacaggcttatatgtttggagtagtgttggttaagagcacacaccagagagcactaggttgaaatacttagctgtgtgatttgaagtaattaacttctttgagcctcagtttcctcatgtataaacagagataatgatattcatttcttgagttcttaataaaaaataaaataattcatgtaagttgttccttgctgtgcctgtacaaaataaacactcaatgtatggtagctgttaagtacaattcagaggttgggacatattcacatttattatctcattttatcctcactgtgatccttactgtgttattctcactttacagatgaggaaaataagacttattgatagctggtaaatggtagcaatgactcaaacccagatctacaattcataagtttcgtgtactttgctctttgttgcttggcatggttttccagattgtcctttatagggatgcagacaatacaatgcaccaatttagagcacagttttagattcaaagttgattgggtttgagtcctaagttactccatttatcagctacgtgactcagggcaaatgacttaacctctgtgagcctcgtttcctcattggcaagatgggaggcattaaatgcacaataaactgatgagatatgtaaagattaaataaaatgtgtcatgtaaagcccctgacatttgggaagtactcagtaagtgttagctcccatcattagtacctgcctcctagagtggtgtggggattcaatgagatagtgtatgtcatgcacttttgacggtgcctagcattagagtaggtactcaataagtatctcgaataaatgagtgagtgaacagacctgttgtaagcctttcatcaaagaattgctccctctccctttcacaatctcaatgccatttttgtaacggattctctgagttcctttgctttactttctgtttctttccacagccaaacaaagcctttctctttttaccccagaactcttcggtctccctctgaggctcccagttctgaagggctagtccctctctctatccatcacaaaagattgtccctctctctcagccttaacaaagattgcccctttcttttctacaagctctcatcctttccaaaaccactgttccctgcataacctaccagtgtgcacgacgctgagccggatctcccctatcaccccatcaacatcaggtgggttcttcacctggcaggtgtatgtcccattgtcgtcgaactgcagtttccagagaaggatggaggcatcgtaccgctcaggattcccatcccaagacacccggtccttaaaccgcccactcatgggttggaagggatctatgtggtagtagaatacctagagaggggaaatggcaaaaggtcttcttactcagcacccaggcaaggaggccaagatggtgggagcggaagtgaaacaccagcaaacccaactgtcctgtctgcagctctgtcacttgctttccccttcaacggcctctcagtctctgtcccaagaattgtttccgagcttaaccttgtgcttgctgctaagaaaaatactggaagggaaaggagaaatggactggcttattatttccctaaacaagagtaccctggaaaatgatgataatctacttacaaactgctcaggtcccccgtctagaggacgaaaattccaggtcactgttagagcatcacccacaggggcaaagctggagaaagtgcattttaaccgagcatctgtcccattaacagcctccagcacccgggaggtataaatttccacagctgctataggccaaagagctgcaatgaaaaagaagaaaaagaagggttaacaggggatgtagtattgtgagaacttctgctgacacttccaaaataaatatctgagtaggacttaaagtaaagtgaaactgagatgccccatctcccaaacttacttcacccagaatctacatactcctacctgtatgcagcctggaccctcccattccatgtgacaactaaactaccacacagcaagccttcgcagtgcttttactttctccacagcattaaagcctcgcctcgtggtactgacttcaaaactgttataacaaactacaaacatccgcaaatagaattgaaagcataaacaaaaaattaaaatgaatcataacattgattagacattacattatgtattaaggttaagcattatgtgttgtatgtaaagtggtctcctagcaggtaagttttccagatgggtccttaggtggatttcatactgttactagtctattgcagaaactgaattaatcaactccagacagcttatgtttgcctgcacccctagaacctttgtaccacgtggcatttttttaaacttgatatttacatttagaatgtgtgtgttggggcactttcaaaatcacagtaggtctctctctaacaatctccactttcctggtgttgctgagagtcacagacaagacccacacacagaaatccaaatgccaagtcctgccagcagtgggaggttgagaacagccacacacaaaaaaatggcatgtaacctgagattagaaagccctctctgtgcctgaatcactggcagctgaacacacctaaacctgtttgtccgagagcagttctccaaaaacagtccaccaactttggtttcagtaaaacccaaagtaaaacaaactgtatctgtggctcaggctcccaaacaaaagtcttgcaacttctaagacaattagctaactttatagagtgagcagtgaaggaggaaactctgagagaagcccgccggctcttacctgtgagctgtatgccaaggagaagaagcaccgcacgagtagagctcttgccatacatgagggaaacccagccttggccccagagaccggacggggcagaccgagggctccaacaccctgccaaggccactccgggaggagcaagcaccgcgttttcccagagagaggagtttgagttgagttcctcacctgtgcctgtgactcagcccgctctgcctgtgcacttttctgaaatgaaaggtggggcctcagctcccaatgccctccttcctttcctctctcccgccctctacacgaacgagcatgagcacgtctgcacaaaggtcccaaactcccgcagtcctctctttactttcagttaatctgactgggctctggcctctagatggcctcggaaacagccagaggaggtggtgccagtctgaaatgtcccagactgttatgggtttggcccccacacgcccttttaaaacaggctttaggcttgcctgggaagtgaatgttgaaactgtcctgcagtgattccacttctcaaagcaccaccccagggccacattcacttgggactggattcgatacaatttcaaaacgggagtcggaattccttaggaccctctgtggacaaaaagctgatacccctgttaccacaaggattcctgcacttcttctagtttgtagctttccaggagacctggcagaaacaacaaatcaaatctccatgcttaacaatcctttacctttgaagactttaaaaacaaatgaggacaccatccctgctcattcaccctgccatccgagtgcaatctacaaagtgctctcctgctgattgtttcatctccattaacgcccttgtgaagcattcccattctaccagtgaggacgctaagaacccgaggaaggtaaatgatttgcccaaggttgcacagctaccatgtggcaaaaccagaacttttcttaaaaatctagcgttctttccaccaaataacagctaatatgaacaatcagacatggggctctcaaggaaaaggttttcatgataactttgttgtgcctcggatttcatctgtcattttttgaatagctaaatgactgagaagtctaaagagctgaggaatctaaacgagaaaagatgcctccttgtctggaaagagggtgggtcatctttacagattaatgaagcggcacagaaacatcggtaggagggggatgaagattacacatgcagttaagaagtaggctgggctgggaatctaaccctgaaaaaagacagattgcgtttatccctggattagcagtctagaaactcttcagtcactcataaaatcttctagctgaatccagagcagaaagggtggcaggaacaagagaaggcggcaggctgagtagaaaaaaataaaacatcataaagagggaagaaaagagaaaattctaccaaaagagaggagaatgcagaagtgcagaaaacagaaagcaacaggagaaagatgacatgggcatggagcaaaaacaggtagacaaccacaaaaatccattgtgttggaactcagaaagcagaggtggccccaaatgcagaccagctgtgtgctagtgaaaatctgttgcatggtgagagtttctgaaaactgtgtggcgtctttgtcagattctagttcagaaagggacctaaaatcagtctgctgggggaacctttcagatgttggtgaggaaggataagatacagcctttctggtatgtaggtcagaagagttcagctccaggaccctgaaagaaaaagagttaaggaaacttgatcttggttggcttccaactttgcagggaaatacagctacagaggaaggagaggtagagccaggattttgaagtctacagcaaattgcaaaaactggtgagaggtagagttaccaaagagctcagggatgcagtgaaaagcaacaggagaagaatcagggcaggaagaactgaacaaactgcctgttgtcaggagcagaaatccctcccccaggtagccaaacacccatgagctggttgccagccttgctctgaggggcaggagttatccagatcccacttctcagctgagttcaagttcctggcttagtgcctggcaacgcccagttccttccagttagcaggagtggctccacagtcaaccacttcacctcactgggcaaggaagaggccaagggtagaaggttaagaagagaaaatgctaaataaaaaggatgtttgcccctcacagttttctggacaccagtcagcaggacttagaccaaaactgcaggcatctacataaggcctaagttatgtttgtgcccaggcaaatggaaggaaaggaagaggagttctggaaattgaaaagaagaaaagtaaagttttcagagacaccattttctttctaaacttttccagagaaagatcctgattgtcatttaaaattgtgacataccaatagtttttgaaagaatctcatctgtcccatccatctacacatttcccaaaaaatgatttctagtgagtatctagaccttagccagcaggagactcactgggggctcaggagacagaagggacagtgggcctgtatcaatatttgtaaaagttgtctttctcaacctcctaggcaaaaatctttttttcacctaaggtgaaattagcattctgtgaagcaaggaaaacaaataatttagctcttagggtcatcaaataaagcattcgtttactcaaaagtgtctgttcatatgtttttactagaaaaaattcagacatacatagaatatttctacctgggaggaaataatataagataggaaggtgaagtaaacaaataattatcactttcttgatttttaaattcaatccttaaaggatgaataggaattctggaaagaggataaacaaagtccttcccattggaacaaatgggtgggaatgtggtacccacagggactagcatgcaattcctcaaacctggagcacagggaggagtggcaggccaggtgagaggctaggtccacctgggcagtgccctcatccaccatcctaaggagtgtggacttgatcctaacaaatatacccattggggatggctaatatgtgacccaagaagagcatccctagaagtagaattactttggtatttcccagaaccattaaaaacaagaaggaaagtcttgggacaccaacgaccacttactctcctggctttcgtttgggctcctggcttatgagccagaatgaaagtgtagacctaacatctgttttccaaagactcagggactcccagccttccccaaccaacaactccaatctctagcatcctttgtcaaaacttccccgggttaagggagcttttcaaagatgagagagggaggctaggctgtcaagagtcctagatgagaggtgggctcttagcccaaaggaatagttgtgttccctgtggccctccttcttgcctgaagtttcctagagatattccaaaacaggtctgggcctgaaactgagcctctatgagtttagaaaaatcgtgggagggaacgctttcctgccccacctcattacagctgatatgcacctctccaataagcctcaggctcctctggtaattatagaggacaggcaccatgcccttattaaccagcccaaagaagagactctgaagtggtttaacgcttcacttattctcaagggaagctacatagattgtgcagggctagagagatggggcatttttgaagataactttaaggaacctctcgggaggataaagggatcttgataaatgaatttatctacctccctgttaaccatacacaccacatttaaatggtggtaagaatttacattatactgtgtttattgatgaacactgcatcttttattattgttccagttatctcttgttaaaattggttaccatgaccaattttttattcttagggagttaattaatttcctgagaaaagaaatagccactttttttttttttttttttttttttgctactatattctaggaggcatgaggtataggagctagagttcaacctgcctagatccagatccaagctcagctgcttactagctatgtgaccttgggcagttatttaactctccgtgcttcagttatctcacatgtaaaatgggaacagtaacatttaccccatagtctggatgtaagaatcaagtgacgtacattaactaaagctctatgctcagcacccacacaaaacattcagtaaattttagttgtttgtggctatacttagttaagatgtttgggaaaagggctggcagtttcttatgaagctaaacactcagccaccctggcaattccactccaagatgaatgaaattatatatacagaaagatatttgtaggagaataatcatggaagctttattcataatagcccaaaactggaacagcccagggatccatcaacagaaaaatggatcctctgtagaatattcatatcgtgaatcctactcagcaattaaaaggaacaaatcactgatacatatcaccacgatgaacctcaaaagtaagttgaacaaattagccagacacaaacagtataaactctttgattccatttatatgaagttctagaacaggcaaaactaccttgtcatgaaaaaagtataaaagtagtgtttgcccctgggggaatgggggcagggattgactggaggggcatgagagaactttctagagtgatattaatgttcttcatcttgacaagggtttgagttaccgcttgccaaaaccctttgaatggtgtacttttaagacttgtacatttaattgaatgtaagttttacttcagtaatttttttaaaagaattgtaaacaaattctaaactctcattaatgctgaagtatttacggggaagcatcctgatgtctgcaatttaatttaaaaatgcatcaaaaataagatgcattaataaatggatggatggaaggaaggaagaatgggtgggtgggtggatggatggatggatggatggatagatatgtgatcaagtatagtaaaatgtcaattgaagaacctaggtgggatacacaggtatttactgtataattctttaaacttttctacatgttagaaatttttcataatgaaatgttaaggggaaatttgctcccacattcaccaagtttcttcagcattaagtaaatgacaacacaaattcagtaataaagcgttggaggttcattacattatatcattctaatttagacataccttagaatactggtagattttaacaaataaaaattaccattaataattttaaattactatttatcaagtgcctaccacgtacccagcactgtggtaggcatattacatatattagttctgatctccgtaactgcaagatgatacgtagatatctccattttatagataaggaattgagactcagagagattgattcattctaatacctgttgagccctgttgctagaaattgtgctagatgccaaacaagacattagtgtgtgccctcaagttgctaactatatcttaggaaacacagtcaaataagtagacaattacaatgcaatgtgacaaatgagttgtgatcagagaaacacggaagccagggtccttcagccagccttggaggccttgggaaggcttcccaaaacaggaaccatccagtgtagctggctagcagctacaggctctagggtgagagaaacatgggtgtgaatcaaaggtctacatcatttattcattcattcatttaagaaacacgttttgggtacctatgacatgccaggcattttcctgggcacacaaggaataaagtagtgaacaaagggacaaggggtggtcagggaagacctctctgataagatgaaacttaagaaacatctgaatgaagtgaggtagtgaaccacgtggatcaggaggaaggacattccgggcagaggaaacagtacagggcctgaggctcccaggagaatgtgtggagtatttgaagaaaaacaaggagaccagtgtggctggagcagagtgaaggggcagtggcgaggggctaagcatggaggggtacaaggcagaccagaccaccaggggtacagggcagcattaaagggttatgaaagacaatctctggaaagggagaaaatatttcatatttgcaaatcacatttctgctaaaggattaatattcagaatacataaagaattcctgcaactcaataacaacaacagcaaccaaacaaccccattaaaaaatgggcaaaggactggaatagacatttcttcaaaaagatataaaatggccagtaggcacaggagaaaatactgaacatcactagacattaggaaaatataaatcaaaacctcaatccattaggatgctattatcacatccactaggataactattaccaaaaaaaagagaaagaaaataagtgttggcaagaatgtggagaaattggaatctttgtgtgttgctggtgggaatataaaagagtgcagtcactgtgaaaaatagtattacagttcctaaaaaattaaacatagaattaccatatgacccagaattccacttctggcatgtacccaaaagaattaaaagtaagtactcaaacagatagttggacaccgacgttcaaagcagcattaatcacaatagccaaaagatgaaaataactcaaatgtccatcaaagtaagaatggataggcaaaatgtgacatatacatacaatgcaatattttcagccttacaaagaataaaattttgacacatatttcaacatggatgaattctgaaggcattatgctaagtgaaataagccagtcacaaaaggacagatactgaatgattctacttatatgggagcatcaagaatagtcaaacccatagagacagaaagtagaatggtggtcgccaggggctgggggaagaggggaatggggagttattgtttgatgggtacagagtttccatttggggagatgtaaaagctctggagatagacggtaataatggttgcacaagaatgtgaacggacttaatgccactgaactgtacacttaaaagtagttaaaatggtaaattttttgttatgtatttttgctacaacacaaaagaaaaagaaaggttatgaaatgaaaagtaaaattatctgactcacgtttaaaatgatcactctgactgctgtgtgggtatctggatttcagtctcttcaaccattcaatgaggataatgaggccttcctcatggggcggttgtgaggattgaataagatagtgcaaataaatcacttagcacataatggcactcaattaacattatctattattgcaattactattataattcttcaattctgaagatacatacaaggtgggcaatgggaggtggcatttgagaggtgagcccaggtaggggcaaaagtaggtacaaagcccaagaaagaagagaaaacatggcctttttggcaattaaaaaacttgagtgtgagtggagagaaaagggcaaaaagaaaagtgaatgaccctcagagatgaggctgaaaatctaatcaggggccagacccaagaggcccttgataagagttaaggagttagggctttatcctgagggcaatgaggaaacactgaaactgtttaagcagtaagtgatttgatcagatttgggaatttgacagatcgctcagttacagtatggagaaaggcactggagaggaataaggccaagcaagaggcttccaggaacccaggcaagagattatttgacctgagctgaaatggtggcagagggaattgagagaagttaagagttcgagagctatcaaggagatggaaaggaaggggattggtacatgattagaagtggacagaagggatattaagtattggaggataattctcaaatttcgaacctaggtaactgggtggaaggtgactgcctttctctcaaacagagaagatgaagacttgctgcatttgatatttctatgggacagccaagcagagagtttagtacagcactattaaataaagtttatgggagcccattgttttggactagcctcctgcagtaggtcccagcagaccagaccaaaccagaatagagccactcatgctaggtgacatgttatcagactgaactctgaaatgggccagtttaaagcaaacgaacagaagagtcacagtaaccaatcaaaagaggccagtgtacctgaactggtatggtaaggaagtcccctggttttttgttttgttttgtttcgttttttggtgttttttgtgtgtgtttgtttgttttgttttttggttttttgagatggaatctcactcttgttgcccaggttggagtgcaatggaataatctcggctcaccgcaacctccgcctcccgggttcaagtgattctcctgtctcagtctcccaagtagctgggattgcaggcatgcaccaccacgcctgcctaattttgtatttttcgtagagatggggtttctccatgttggtcaggttggtctcgaactcctgaccttaggtgatccacccgcctcggcctcccaaagtgctgggattacaggcatgagccactgtgcccagcctgttttttgttttgtgtgtgtgtgtgtgtgtgtgtgtgtgttctttttgatggagtttcactcttgttgcccaggctagaatgcagtggtatgacctcggctcactgcaacctccacctcccgggttcaagcgattctcctgcctcagcctcctgagcagctgggattacaggcgtgtgccaccgcacatggctaatttgtatatttttagtagagacggggtttcaccatgttcgccaggctggtctcgaactcctaatgtcaggtaatccacctgccttggcctcccaaagtgctgggattacaggcgtgaaccaccatacccagccagaagtcccctctattttagcccaagaaggaaggtcacttccaaaccacccataggctgggtgcagtggctcatgcctgtaatcccagcactttcggaggctgaagcaggaggattgcttgaggccaggaattcgaggctgcaatcagctataatcatgccactgcactccagtgtggccatcagagcaagaacctgtctcaaaagcaagcaaaaaaaccgttcgtccactttttgtttcctgtatctgctttcttcagcccctttctacctataaagccaaccccctgtgctcagctcatcagaacactcattctgttttatggaatgaggtgttgccctcttctagaattgcaaataaaagccaattcaatatttaagctaaatctgtggtaattttgtcttttgacagtagtacccaacacagatctgagctctacagagagttctggactggagatgccagtctgacgtctttcacctttctagaaggtaactgtgagagtgggaatagatgagatggtccgagaccacagtagagtgggaaagggcagaatctagaggttgaacaatacctaagggacaaggggaagaggagatgtctaaagtcactgaataagagtgtccagacgaaagggaaagaggagaattaccaggagagagtggtcatagaagccaagggagagaggtatttaaataatgaacgaatattgggaccagacgcagtggctacactaggagtacaggcatacggccgaggtgggcagatcacaaggtcaagagatcgaaaccatcctggccaacctggtgcaaccccgtctctactaaaaatacaaaaattagctggatgtggtggcacacacctctagtcctagctactcgggaggctgagacagaagaattgcttgaacccgggatgcggaggttgcagtgagccaagatcgtaccactgcactccagcctggtgacagagcaagactccatctaaaaaaaaaaaagagcaaatacacaaaatatcaaatgctgctaaagtcaaataaaacaaggactgaaaatgtctagaagattccccagttggtgattttggtggaagcagtttcatcagaaaagttatgaagcagagcccattttgcagtagattgaggaatcatggtagactaggatgtagtttactcttcaaaggacagagcttataaagagggcagagacagaggcagctggaaagaaataggaatagaaagaagttttcagatcttgatttatttgttggttttaagggaaagactttagcatgttaaaatgcttttaggactgaggccaaagacaggaggaagtgtacctcttgcattgttaagaagaggtaaagaatgttctggctgcttaaatcagccctggctcatacctcttattccactgtaatgattaactgtacgccttttacgctgtggtgttacagtttggaagaaaatttatatagtccatctacataaaggggagcccccagatggggcacaggtacagttaactttgaaggtaaaagggttgggacagaaagttgaaggagtttttgatctgggcgtgtgtgtgtgtgtgtgtgtgtgtgtgtgtgtgtgtgtgtgattttatagttttttctcccctgtaagggagttatcatctagtggtctctactttccttgtgtagtagagaaggaaagtcactgtcctagagtagaggagatggagaggcagaagtcttgaagacagaggtgacccaacggttttttgacaggaataagagaggaaattggcctaaggctgagacttaaagagatcaagtagtataaccaaggtcaccaggctagtgatatagtcagactcacaacaagacctgcctaactcacaggtcaactccagagacaacttcaactcctccttcaacatcagtctcccttcctcattagaatctaccaaacacgtcaacagtcaactctcagttgtatgtaccaaccactctttgaccagtagtgccttccttccctccccagaactgcacctccaccattctggaagacttttgaagcaaaagcaaatgaaataaacagtaggcatccttttctcagcatctctcctgaaagaaaaagtcgaagggaaaatacttggaatttttgcctacaatgaggttaggactgtgcaaaatctcattttgttccgtttgcctcctattactttaaaaaaatagttttgagcaactaccaagtgtcaggcaccatcctcaggaattcaagggtgaaaatgataagatcttagccctcaaggagctctcaggttaaagaaaaagaaaattagtcacaatacagggtgacgtcaataataaaggaaatgccaagttcaaatgatagcacaggaagaacaagctctgcctggaagcatgagggaagctgtctctgaaaaggctaaccatacatggcatcctttagccaagacccgatgacaaaagaacaggggggctgggttagggtgaaatagcatggctcacacaagagcttcaagtcagaggccagcttgtgggaatcgcaataactaccatttgttaaataattttctttctttttttatttttgagacagagtctcactctgtcacccaggctggagtgcagtggctcgatcacagctcaccgcagcctccacctcctgggctcaagcgatcctcctgcctcagcaacccaagtagctgggaccataggcacgtgccaccacgtccacacttggattctttgtagaaacggggtcttgctacgctgcctaggctagtcttgaactcctgggctcaagcaatcctcccaccttggcctcccccagtgctgggattacaggcgcgagccaccgcacccaggcaataattttcttttaatatctttacatctcacaacaaccttagaaagtactttattaatctcctcattttgcagatgagggaaatgacactaggacatttagtaacttacccaagcttacatagctgggaagtagtacaactgggctttaattccaaactccatgatccttcctccacaaaacaagcttaagacagaagaggcagagcagcaggaaaggagctgtcaaaggtgagagtcttttgtctccagtttggtccaagggtttttcattgaagtctgatgatgtcagggaaattctaagaagtgatgggaattttaaataagtgtgaaagagaaaggcaacagagatttgtcagtaatgctaaagaggttttacctttttcattatcaatgggttttgtacacatataaggatttaagcataggtatgcaaaagtggttgcatggagcactcactgaatcagaacaggaagaggggtagaggaaaatctgaaggttaggtggattctccacaagaggtacactgtcccaggcagagtggaaaaaggctccaccttttccaacaccattaaacattttgatccatcaataccactgagacagtgagcttacgtttgaaaacagacataagcttttttggaggaaagctgatcttgcaagtagcctacttgaataacagcagtggaagcttagaagctcatggcaagaactgacttgtaatccccaccagtaattcttgttttccctggcctcagcctcagcaactttctgtccagggtccttgacttactgtaactccacctcttgttctttgctcttttcacaagccatctcagccatctcaggggagaaaagggggcagcagacacattttgtttgagataatgtaagcagggagaagtatagaatcaataactcaagcaatgggaagagtttgcctgcttaaaactcaaaattgcaagaagccgtggagacctattacactaacatctagattggcatctggacagacaccactcctcaagatattagtaggtactgaacaacagaaaagattctgtacacaagggaaaatgctagattaaactaatgaaaagaattttgttttggtttggttttagctacagtactcctcagggctttcaatatgctaacatgggaccaggttttttataccttacctagtcatctttccagaactttctgttcactgaaaaaaattgggacaatgcatctcaaagtgtggcctgcagactacctggaaactgtcactggtccttaaggagataaatacaaaacctgagagtaagtatttaaagttattacaagtaatttgacattgcctcaacatccaaggctgtgatcagaggactcactggacaggttatagaacagtgcaggggttgcaaattgtatggcaggaggcatcatcatagatctgccaaatgctgaaaagcagcaaaggtgctgagttagctaaggtatttcagcctttctaccttcccctccatttcccattgaggcctgaagcttcaagagaacaagcaggttggacttgtcagagttgagaagcctttctgagtagaaagggcagccagctgcttgtccaggcaaacaggatgtgagtcttctcaggtgagtcagagctaaagaggaaagcctttcctgcctagctcagtgagggggtccacccttagctttggaaaggggaaaactcagggaaaagtcccagcaacatcgctcttttcttgcagtttgttccaatgttatatgctgtcttgagtgtcaatatctgctgagctacattagcaataaccaagaggaaaagaagcttttaaagccaaagaaaaattgtcatttaaagttgtcaccttggggacaagcttttattctaatgatgctgacgttattccagatatttctagaacatttttagaattgccttaggagtttgaatcataacatttttcgatttaaaaaaaaaaaaccagggtctcgctctgttgcgcaggctgtagtgcagtgatgcaatctcggctcactgcaacctctgcctcctgggctcaagcaattctcccacctcagcctccctagtagctgggactacaggcacgtgccaccatgcccggctaagtttgtattttatttgtatttttagtagagacagggtttcaccatgttggccaggctagtctcaaactcttgacctcaagtgatccactcaccacagcctcccaaagtgttggaattacagacatgagccactgcatccagccttgagatttttactgatggcaaatcctcatgcttttgagaatgggcttgatttttggacacatttaaaagtcatgtagatcaaatccaaagaaagtaagaaagtgaatgaccaaaccaggcactgattataaaatcataagtatgatgacttgtgaaatgcataaatggtccctgaggatcctttaaaagacaggattctctttaaaagctctttaggccaggatcggtggctcatacctgtaatcccagcactttgagaggctgaggtgggcggatcattagatcaagagatcgaggccatcctggccaacatggtgaaaccccgtctctactaaaaatactaaaattagctgggcatggtggtgtgtgcctgtagtcccagctactcaggaggctgagacaggagaattgcttgaacccaggagatggaggttgcagtgagacgagatcacgccactgcactccagcctgggcaacagagcaagactctgtctcaaaaaaaaaaaaacctctttaaaaactgttttgtgcataactataataaaggtataattttccatttactttaaggtctcttatcttattaagctggatgtataccttaactggctcttcttaattcacagattaaggcctttcatgatctgcctctgtcaactaaccagcccctctttccccactttccaggctccttaagccttattcatcactatgccaaactaatcacatacttgttcttacctccacatatatatttgtgcatatgttctgtctactttatccagctgatcaactcttatttgcctttcaaaattaagttcacattccatgaagccttccctgtcccctggacctggagttaatagttcccttagcaccttgggacaccttttttatagcctttgctgcactgtatggtcattacttgtttacacgtctgcctctactgtagactgaatccctccagggcagggttcatgtctctgtatccccaacacctaactgttaggcacatagtagatgctcaatacgcatttgctggatgagtgaatgcattcttactgaagcatctgtgtgccccacacctcagtgatgctaagcagtatggagctcccactgttggaacctaaagaagtttactaaggaagtgaagtgacaacctaaaactcagtcccagctttaacttggcttatctttgcatctaagtgaagatcatctctaagactgggatatctacactgaacaagggcttcccaccttcctctgttttcagcctaggtgcaaccatgaaaggaaaggagcaaatgtaatctgtatcataatatattctatttgaacatgattaaattaaaactaattgataatgtcgattaaataataaacactaattaaatactaattgtcagaatgtgtctcctacttttattcactctttataagttttaattactaagttaatgatcaagaatggtactatgttgggctgaaacctaggatttggaatatacccattcattcatctaccaaataatgtttaaattgaatttaaaaactaaggctgaataattatagagcacctgttatatgtctaacactgtgctgaaaaaaaatatatgaagatgccatatttagcttcatggaattcacaacccagatactagaaccttccatctgcaaagctctttgcaaagcatttgaatacattgtatcatttaattctcactattctattctacccaattttcctcatctactttagataaggaaaatgaggatgacagagatgaaacagtttacccagttactcagctcactctggctagaaaataaatggaaaaattagggctgaatctgggagttctgtctctaaatccaaagcttttctcatgggctcacacaaagtcaataatttttttttttttttttttgctttttactatggaacatttcaaacatatacaaatgtagataaaataatataacaaaccccatgtcctatcacccagcccttattatcagcaacccatggtcatttatgtctttatctacccacccaatattattttgaagcaaattgaagataccatatcattttgcccataaatataacttctgttaaaagataaactttggcacactttaaaactttgaagagtttatttgagcaaacagcaattcattgatcaggctgctccaaactggaaatggtttgggcttcgaggacggagcaagaggggaaggctctaatagggtaaatgcagaagcagagcaaagaaattatttgattggttaaacttccagaatttccttatttagactatccaataggaagttaaagacaatataactaatgcccagatggccttctgtgattggctaagtttcttttaaattaactgcttacaggaaatgagactgagttaggttttagcttgcttagtaggaacttagttagagcctcctcagtctaatgccccccccatttaattatttaaatacttcaacaccattatcatattttattttatatttttagagatggagtcttgctctgtcacgcaggctggagtgcatggcacaatcaattatcttgcctcagcctcccaagtagctgggaccacaggagtgcaccaccatccctggctaattttttttttatcttatagtagaaacagtctgtctatgttacccaggctggtcttgaactcttggcctcaagcaatcctcctgcctcgcccttccaaagcgctgggattactggcctgagctaccatatccagtctccattatcatattctaagagaattagcatttcctaaatgtcaaataaccagtgttacaatttccagttatctcataaatgttataacatgtttttacaatttgtttatttgaatgaaggtccaaataaggtctaaaatttgcaattggtctttatgtttcctagatctctcttaatctatgggttccttattatcttttattattattccttattattttttgtttccttgcaatttacatttaaagaaattgagtcatttgtctcatggttttccacagtatttttttttttttttgcctgcatcacgaaggtgttgtttaatatgttcctctgtatttcctatagactggtattgtatttaaagcagtagttttccatttttagtgagcatcagaatcacctgaatgatttgtcgcaacaggttgctgggccccaccctcagagtttctgattctggtctgggaaagtcccaaaagtttgcatttccagcaacttcctgtgtgcttgatgctgaccactccttgaaagctattgatgtggactgaactgaggctcaatcagattgaaatctgacttttttaaagcaagactacctcacaggcagtgttgtggtcttcctccaggaggaatatagtatgtggttgtctcctttgtgtgtttgatgtcagtagcctttgatgctcagtgcccagatccattcattcatttggtgtgcaaagtgatgatcttctaatcatatcatccctactttatttattagctagactatttctagaaacagaaactccctcatctacaaagtgactactcactgggatggttcatatagaaaagatcgattttgaggccgggcatggtggctcacgcctgtaatcccagcactttgggaggccgaagagggcagatcacgagatcaggagatctagaccatcgtggctaacatggtgaaaccccgttgctactaaaaatacaaaaaattagccgggcgtggtggcgggcgcctgtagtcccagctactcaggaggctgaggcaggagaatggcgtgaacccaggaggcggagcttacagtgagtcgagaccgagccactgcactccagcctgggcgacagagctagactccgtctcaaaagaaaaaaaaaaagaaaagaaaagatcgattttgagcacaatgcattggttcactagcatcttccaatgattagcaatgagagttttttgtttttagtgttattacacataatgacattgtgacataatgaccagccattccccagtctctcttcacaggcctcccaattccctgagacacatgatattgaaattaggccaattaaaccctacaatggcctctaagtgttcaagtgaaaggtagttaacacacctctcactttaaattgaaagctaaacatagcattaaatatatttgatgtgtttcaaacaacatcattattattcttattgattctcaaattttctcatctttggccatcgggagcctcttcaagttggaagaggctcttccagcttcaagtgcatccttgcaaggtgtgtttgctgcattctttatgaatgttaaagtctgctatagaaagtaagagaaggaaacaaatatggagactagatgaaattaagtgtagaagcaagtagcttgtaagacgtgttagaccttggtaagtagagcagatttatgctgatataagaagggatggacagaccaagtagacacaagacacaggaaacaccaaatatttatgaggcactgaatattcacaaaaatttaaaccagccatcccgttgtgacacccattctggcaatctgcatcctctgcctgagatatgcagataaaacccatagctgcccaacagggtaatcggcaagctacagctgtagccaaggattcttgcccttgccttcctacaatagagcaagagtgtttgggctccaggcccagtcaatttgctgagtcctcttgctcatccacaactcaggtccttgtaaccatcggtggggaaggctgatgcaatagaaagattcggcatatgagcgttacataacacagaactcacatagggtacttcttccaccctgtgctaagggtgttaaccttcctcatctcttttccattgcttcttactaaacattttaattgagttgataaaccaagtgattcaggatcgtaattttgtctgtgagccattctgttctgtgacctctgggatagcttgttatgtaatatgttagaaggttatcattgcaccaaggtaattcctcatgtgacagtccttttgacccatatgacgagatgttccaggctcatcttgaacacttcttgccatagacttaaaatcatccgcaattcttcaaggatccctgatttcttttagtgggaaatggtgtttgaacctacaatctgggcattaaggatacactgctacgagggtgttaaattatttttgtgactcatctactgctttatgctgtataggcagacctcattttattgcacttcactttattgcactttgcaggtattgtgttttttacaaattgaaggtttgtgacaaccccatgtagagcaaatcattttccaacagcatgtgctcactttgtgtctctgtgtcatgttttagtaattctcacaacatttcaagcttgtttattattattctatatgtcgtggtgacctttgatcgtgatcttcggtgttacagtagtagatgttttggggcacaacaaaccatgcccatacatgatggcaaacttaatcagaaaatgttgtgcgtgttctgactgctccacagaccagccagtcccccatctctctctctattctcaggcctccctattccctgagacacagcaatattgaaatcaggccaggtgaaccctacaatggcctctaagtgttcaagtgaaaggcagtcgcatgtctctcactttaaatcaaaaactagacatgagtaagcttagtgaggaaggcatatggaaagcagagataggcagaaagctcggcctctcgcaccaaacagctagccaagttgtgaatgcaaaggaaaagtttttaaaagaaattgaaagtgctactcgaatacatgaatgataagaaagcaaaacagctttgttgctgatatggagaaagtttgagtggtctggatagaagatcaaaccaaccacaacctttccttaagtcaaagcctaatccagggcagggccctgactctgttcaattctatgaagcctgagagaggtgaggaagctgcagaagaaaagtttgcagctagcagaggttggttcatgaggtttaaggaaagaagccatctctataacataaaagtacaaggtagaccaacaagtgctgatgtagaagctgcagcaagttattcagtagatctaagtaaggtaattgatgaaggtggctacactaaacaacagattttcaatgtagtcaggtgcaggggttcacacttgtaatcccagcactttgggaggctgaagcgggaggatcacttaaggccaggagttcgagaacagcctgggaaacacagtgacaccccatctctacaaaaaaataaaaaattagctgggcatggtggcatacacctgtagtcccagctactcgagaggctgaggcaggagaatggcttgaacccaggagtcccaggaggctgcagtgagctatgattgtgccactgtactccagcctgggcaacagagtgagatcccatcttaaaacaaaaacaaaaacaaaaaaaaacaagaaagaaaactgggcatggtggtgcacatctctagtcccagctactcagaaggctgggatgggaggatcacttgagtacaggagtttgaggatgcagccagctatgattgtgccaccgcactccagtatgggcaagaaagcaagatcctttctcaatttttttttttttgagacagagtctcattctgtcatccagactggagtgcagtggcacaatcttggctcactgcaacctccacctcccaggttcaagcaattctcctgcctcagcctcccaagtagctgagattacaggcatgcaccaccatgcccagctaattttttttttttttttgtatttttagtagagacagagtttcaccatgttggtcaggctggtctcgaactcctgacctcgggtgacccgtatgcctcggcctcccaaagtgctgggattacaggcatgagccaccatgcccagccatcaaatctttttaagttaaaaaaaaattaaatgtagacaaaacagccttacgctggaagaagatgtcatctaagactttcatagctctagaggagaagtcaatgcctggcttcaaagcttcaaagacaggctgagtctcttgttagtggctaatgcagctggtgactttatgaagccaatttatcatttaccattctaaaaatcctagggcccttaagaatgatgttaaatctactctgcctgagctctataaatggaacaacaaagcctggatgacagcacatctgtttccagcatggttttttgtttttttgttttgttttgttttgtctttttctttttttgagacagagtcttgctctgtcgcccaagctggagtgcagtggtgtgatcttggctcactgcaagctccgcctcccgggttcacaccattctcctgcctcagcctcccgagtagctgggactacaggcacctgccaccacacctggctaattttttgtatttttagtagagatggggtttcaccatgttagccaggatggtctagatctcctgaccttgtgatccgcccgcctcggcctcccaaagtgctgggattacaggcatgaaccaccgcacccagccggtttactgaatattttaagcccactgttgagacttactgcccccctaaaaaagattattttttaaaatattattgctcattgacaatgcaccttgtcaccaaagagctctgatggaaatgtacaaagagaaattactgctgttttcatgcctaccaacacaacatctattctgcagcctatggatcaaagagtaattctgactttcaagtcttattatttaagaactacattttttaaggctataacaatcatagatagtgggatggatctgggaaaaggaaactgaaaaacttctgccaaggattcaccattctagatgccatttaagaacattcatgattcatgagagaaggtcaaaatattaactttagcaggagttcggaagaggttgatcccaaccctcatggatgactttgaggggttcaagacttcagtgaaggaagtaactacagatgtggtggaaacagcaagagaactggaattagaagtagagactgaagatattactgagttgctgcaatctcatgttaaaactttaatggatgaggagttgcttcatatgggtaagcaaagaaagtggtttcttacaatggaatctagtcctagtgaagatgttatgaacattgttgaaatgacaacagaggatttagaatattagataaacataattggtaaagcagtgacagggtttggaggattgactccaattttgaaagaaactctactgtcggttaaatgctatcaaacagcattgaatgttacagataaatctttcatgaaaggaagggtcaatccatacagcaaacttcattgtttttttttaaaaaatttgcctcagccgccccaaccttcagcaaccaccatcctgatcagtcagcagccatcaacatggaggcaagacccaccaccagcaaaaaagattatgacttgctgaaagctcagatgattaatagctttttttttttttttttgacagggtctcactctgtcgcccaggctggagtgtggtggtgcaatctcagctgactgcagcctccaccctacaggttcaagtgattctcctgcctcagccaccaaactgtaatcctcagcctgggactacaggagacatgcaccaccaccccagctaatttttgtattttttgtagagatagggtttcgccctgttgccccggctggtcttgaattcctgagctcaagcaatccacctgcctcggcctcccaaagtgctaggattagaggtgtgaggcaccatgcccagtggatcaatagcattttaaagcaaaaaagtatttttaattaaggtatgcacattgttttttagacataatgctattacacatttagaagactacagtatagagtaaacataacttttataggcactgggaaaccaaagaatttgtgtgactcactttattgcagtactcactttattgtggtggtttggaactgaacctgcaatatctctgaagtatgattgtataggcttcttagtttttccattaaaatgaacaatttaaaattaaatactcaggctcagacttcaatctactctttattcaatcaactctccattagtcaaactttatagataaattaattaatgggaaagcaaacagaaataccagattttaggttaaacatgacaaagtgaacacacatgtatttcgttctttttatctcctagaaagcccactcaaatggcatatacccataaaagacaaggacaatataaggataatagcagacaagaaatgcaataaaaatttggaagctgaaaaacaagtgaatgagtgataaatacaatagaatgccagaaaaaaactaaattcttccagaaaatagaagaaataaaatgttcctcaactcatttattgaggccagtataacactgatacaaaagaaaataagataaggacacttaagaaaaaaattccaagccaatttctctcatgaaaataaagacaacaattctaaacaaaatattagcaaattgacttcaartgggtaaaaattttaaaaagataacacaccactaccaagtaggacttatttcagttatataacaatggtttaatatcaggaaatctataaatgtaattcatcatataaacagcttaaaagagaaaaatcataggaacctgtctatagaaccggaaaaagtattggataaaatctcatgcctattcaggataaaagctctttataaatcagtattagaagggaattccttagcctgataaagggtaactattaaacccccacagcaaatattgttctaagtagagacatattagatcattcccaatattcaatataattcaataattaaagaagaatgcccagtatcttcgctgctattcagtgttatattggaggcccatctggtacagtacaagaaaaacaaattagaagcttacagaacaaaaaaagagaaaataaagctgtaattgtttgcagatgacatgattttttacattgacaaagcaaaagaatatagacaaatgtttaagaataatagaatttagcaatgaaactgaatattacaccaatatacataatatttaaaaacatttccataaggcaacaacaatcaacaacaaaaaaataactttttttttttttaaacggagtctccctgtgccggccaaggctggagtgcagtggtgcaatctcggctcactgcaacctccacctcctgggttcaagtgattctcttgcctcagcctcctgagtaactgggattacaggtgtaagccaccacacccggttttttgtatttttagtagagatggggtttccccatgttggccaggctggtcttgaactcctgacctcaagtgatccgcctgcatcagcctcccaaagtgttgggattacaggcgtcaggcaccgcacccagccaaaaatacataacttttaaaaagatactacatactatagtatcagagtatatctcatacctaagaacaaatctaataaaaaaaaagtatgacctacacaacggaaattataaaactttagtgacatttaaaaataccttcatagaccaggcatggtggctcacatctgtaatcccaacactttgggaggccaaggcgggcggatcacttgctcctgggagtttcagaccagcctaggcaacataatgaaacttctcctcttcaaaaaatacaaaaaattagctgggcatggtggagtgcacctgcagtgttagccactttggaggccgaagtgggaggatcgcttaagccccagaggttgaggctgcagtgagctgagatcgtgccactgcactccagcctgggcaacagagtgagaccttgtctcaaaaaaatagcaataataacagagagctatgtcatgttcatgtattttaaacaatataataatatcataaagatataaattccccccaaattgatctataaatttgtttcttttcctatcagaatcacagcagggtttttcatgaaacttaagattctaaaatttatatggagaagtaaaaagccaagaatagccagaaaaaggaagagcagggcagggaactgactctatgccaggatgtattgtaaatctataatagttaagatgatgtggtattgatgtaaggatagaaaaattaactgatgagacaatatatagcctataagtcaggcctttatgcatatgttatgcatataaaaatttggtatatgatggaggtggcatagcagatcagtggggaaaggaaaatatgtccaaatttggagcttggaaaaatgccataggggaaaaaatgaaattgaatctctagttcacattgtacacaaaatcaactccagatggttaaggggtggaggaggcaggcaggagattgttggttttcattataaactttacaatactattagactgttatgttatttagattaaaatacaaactactttttaagaaagaaaaaaattcccagggttaacaaagatgtaatgaaagagtaacatttataccctgtgtgaatataaattggtatgactttttggaagggtaatttacaaatatctgtctaaattttaagtacatgtatcctttggttcagcaatctctcttctagtagcttatcctgcagctatagttgctgaagagatatgtacacagatgtttcttgcagctttgtgggtgtatttgtccattctcaaatagctacaaagaaatacctgagactgggtaatttattaagaaaagaggtttaattggctcatggttctgcaagctgcacaggaagcatgatgctggcatctgcttggcttctggagaggcctcaggaaacttacaatcatggtagaagacaaagggcaagcgggcacatcatatggccagagcaggagaaagagagagccagcgaggtgccacactttttttttttttttttttttttgagacagagtctcgctgtcacccaggctggagtgcaatggcacaatctcggctcactgcaacctccgcctcctgggttcaagcaattctcatgcctcagcctcccgagtagctgggattacaggcatgcaccaccatgcccgctaatttttgtatttttagtagagatggggtttcaccatgtgggccaggctggtctcaaactcaacttcaggtgatctgcccacctcggcctcccacagtgctgggattacaggtgtgaaacaccgcgcctggctgaggtgccacccttttaaacagccagatcttgagagaactcactcactatcacgaggacagcaccaagaaaatggtgtgaaaccattcatgagaaatccacccccatgatccatgacccacctccaacattggggattacaattcaacgtaggatttgggcagggacacacatccaaactatatcagaggggataggggaatgtttaatcggtatacagtttcagttttgcaagataaaaaaaatcctggatattgattgcacaaaattgtgaatggacttaacactactcaactgtatacttaaaatggttaagatgataaattttgttatttgcatttcaccacaatttttaaaaaaataacaatcctgaaaaaaaaaatggggccactgctcgaggactgcaagtttgctagaacctgagaggagataggaatcatttgggaggccagagaggagaacatgattaagtagagtgccagaaatcagagcaggcttcaagctggtccggaggctcgtggtggaggttgagtgagggcaaagttcagagaagtaggacacctcatgccaagtatattcgtgtccataatactgattttccagtcagttgctgcctccttctgttcattttgggagggatcgcgatactaggttctgcaaaccgaggtcggaggaaggctctaaacagtgattcttaactgagatggcacggttccccggaagatgttttggaaatgtgtgggactgtttttgtgagatgctagaggcatttagtggttgggggctagaaatgctggcatcctgcaatgcatgagaacagttcagcaaaacaaagaattgtcctacatcccacacgactttcaaatggcacatgggacattaatgaagctggaaaacctaaatgtgtaatatctgatcctagaccgtagctccattttacacaatatgttttgcatggttttaatatatgttgaattttccaggcatgcaactaccatataatttaaaggaagattgttttgttcagagctttatcaatcgttgtttactgcttttgaaaattacatcactaaagcacccgtggtatttgagtcaccggcaccacccaatagcatacatttgaagctgagcatttacatggctaatacatacacaggcaagaatctgactcttattctgtcttctcatggaatcatgccaaaggatttatttcatcatacacttcttgtatttcttctttacaaggagcattgtattgatttgagggaaaattgtgtgtggagattcgctttcttttctgtgatttcctttcagcgtagtaaaggggatgttacaaaatagttgttataggaaggggcgtgtgtcttaggagttgagaagactacattacactaaggtggccagttgttgttctgggctgtgccatctcaactaattaagaactggatggtgccggaaagggaaggacttcaagccaaggaggggacctaggaacagaagcatgaatgatatgaggactgagtcagaagaagcaaaaattaacaaataaatgcataaataagtaagacacgtgagcgctaggaaaagcaggatgggtatgtccacatgctgatatcaaaaatacatgcacgttaggcagggtgcagtggctcattcctgtaatcccagcactttgggaggccaaggcaggaggatcgcttgagcccaggagttcaagaccagccttgaccacatagggagacttcatctttacaaaaaataaaaataaaaatagctcggtgttgtagcacacacctgtggtcctacctacttgggaagctgaggcaggaggatcatttgagctcagaaggatgaggctgcagtgagccatgttcttgccactgcaccccagcttgagtggcagagtgagactgtttcaaaaatatatctatatttcacattagattcatacctatttgaaaattagcatcaattattcttttcttttttaaatgtttatctttagttatataagtaataaatattcattacagaaaatttcaaacgtagaaaagtatacgaagaaaatttaaattgttctatttatattcatgtaccatctttgtaggcattttgctgtagttttttccagtcactttcataaatatacatttgcattgtacatggtaaagattatactgtgcaattctgtcttttttgtatgattaaattgaattggttttgaatttttttagatttaacttgtcaattccttttggttctatagttgtataaaagatataagcatattgagttcttgcctagttttatgtatctatcattaaaaaaagaattcccatgaaatcacatcccctccaaccaaagccccattctctgctctctttcactgaaaaacttctcaaaagagatgtctacattctgactctacctctttacctctcatttatgcctaattttttttagtgaagaagtataaggacattgttttaaaaaatcagtttgctaggccgggcacagtggctcatgcctgtaatcccagcactttgggcggctgaggccggtggattgcttgagctcaggcgtttgagaccagcctgggcaacatagcaagactctatataacattacaagaattagctgggcatggtgcgtgcctgtagtcccagctacctgggaggctcaggaatgagcctcgaccgcgtcactctactccagcctgggcgacagagcaagaccctgtcttagaaaaaaaaaaaaaatcaatttgctgaaggcttagaatgaaaaaacaaccaaccaatccttgcccctccccttttactctatgatctattactttgacattgttctgtagtctttctcccatgtgtgtataggtgtctatttgtacattctttttttgaggcttgatttacataccataaaatgcacccttttaaatatacagttcaagaattttgacaaatgtatgcactcgtgtaccaccaccccagttaagatacaaaacattcctgtcacccctaaaggttccctcaaggctctttgcaatcaatcttccacctacctccagccccaaacagccaataattttctttctgtcactgtaaattaaatattactgttctaagccaggcatagtggctcacacatgtaatctcagcatgttgggaggccgaggcaagaggatcatttgagtccaggagtccaaaaaagcctgggtaacctggtgagatcctgtctctacaaaaaagaaaataaattaaaaaataataataaatacactttactgttttagaatttcatataaaagaaaccatacagcaatacacttttgtgtctggattctttgcttaaaataaagtttttgagatgtagtttgctacatcagtagtttgctcctttttattgctttagtagtatgctctgaatgtactgcaatttatttattcattcatctcttgttgaacatttgggctgtttccaggtttttgccattattatttttttaaaacactgctgtgatcatcatatacatgtctttttgtggatacatgttttcgtttatctcattaacctgggtatggtattgctgagtcgtaacataaaagtatattaacttcataaacaaaactgacaaccatttttccattgttatttcaagtggttgtaccattccacactcccaccagcaaagtaaaaaagttccaattgttccacatcctcttcaacacttactattgtcagtcatcctaattttagccattttagaatgtgtatagtagtatctcattgtgatttgaatttgcatttccctgacaactaatgatgttgagaatattttcatgtgcttcttggctatttgtatgtcttcttttatgaagtgcctatttatatcctttgcccaattttttattgggttgccttcttactaagttgtaagagttacttatatattttgaatacaagtcccctgtcagatacacatattgtgaattatttctcctagtctgtgacttacctcttcattttaatagagtctttcaaaaagcaggaaagtttttaattttgacaaggtctaacttactcttttttaccttttattatttattaaaaattactatttttgtatcctaaaatatgtttgcctactccaaagctatagtgatattatcctatgttttcttccacaagttttatagttttagcttttacatttaggtccttatttcaagttctctctctctctttttttttttttttttttttttttgcatagtttgaggtaaggattgaaattcattattttccttatggatttctatctagtttttcctagaccatttgttgaaaagactatcatttctcccgttgtttactttccttgaaaatcaattgtttatatatgttagggtctttttctgggctctctactctgttttattgaattatgtctattcttaatgccaattccagcaatacacttcaaaataccccatgagtcaaagataaatcaatggaaattagaatgtattttaactgaataagtaaaatacaacatattaaaatttgcggaacgcagcccaagcaacaacatataagattttcagaaacccaatgttaaccaaaagacaccaaacacaaagtatgagtgatatgagtgatttcatttacataaaactcattaaaaggaaatggaaattagtgtttagagatgcatgctgtagcaggtgttgctggtgccctgtcgcatccccttcacctgctcagtgcacccatcccctggcttctgtgagtattgactgctaatagcttcacagcagcacacttcgcctgagaattgccctccacctccaggaagctgccttacctggcatcctgcagccaatgactgacagataggggaatacagaagttcagtctcctgcctctagacgggacaactccgcgggggcattcttgctctagagctcccctggagatcagattaaggatagacctcagctgaacccacattttgaactagctttttctcctcttctaatgtgccatccagtgccatccttactcccttacagaactcatctgaaggcactccctcaccaaatcacttgaacaagaattgcaatctcaagctctgctcttgggggatcaatcctaaactagttggttctagaagtggtcctaaaaagtagattttaaagatgggattctggagttggataacagatggcaatgaagaccccatcatcaatggtaggaggagctacagcccctgtgatgacctgggccaagattaaggtggaaggaatacactggcttacgaatgctcctggcatgtgagaagttcaggtaaatagtaactatgaagattgtgaaattgggtggctcttgcttagaaccactgatatgttaaagaaagaaaatgacaagctcatatcaattaatcaccgatttaaaacaaagtgagtcagaggctggcttccttagcagcatttaaagagcacctcatctcctgcagctagagggcaccctctgtaaaactggaagaatttcagaggaggaattcttagcctaggtaagttgcttatgccaaaatcagggccatgataaggaagatatgggaccctgaggctgagcaaatgtgattgagacccctgaacttccagttccccctgaacccactgggcctaggcttcaaataagaaggtaccttacaagacatcattagcccatctcagaatctgccctcacctcccctcctggccatcagatcaatcactacagtcaaatctcaagatgacccaactgaggaagtgctggggctgctgagagaagagagagattgatatgccaaggccgctgcaggaccccactgatgtggactggcaagacctggggcatttgcctgtgggaggcatgtggatcaagtggggtggaatgtaaagctgaatggaagaggctttgtcaatgtgggggcactctcatgacacgagatttaatacctggtatgggccctaggagactgatttaatctgctgctaggaaggctcttgaaattttggtaagagtggtggcccacattaaatgaagtagagtgtctgaactgctgtggcagactagggagaaaggaccaaaaaggatcagagagtgagcatgctagaatgaatctactctcaaataccagaaaacccaccagttgactctatccctcggggggcctagaggatttgccaacacattctaataaatgagcaccagcattattttttttaagttttttttttaaatttttgtgggcacatagtaagtgtatatgtttatggggcacatgagatgttttgataaaggcatgcagtgtgaaataaacacagcataaagaatggggtatccattccctcaagcatttatccatgagttgcaagcagttcaattacactctttacattttcattttttggtttttggttgttttgttctgttttgttctgttttttgagacagagtcttgctcagttgcccaggctggagtacaatggcgcgctctcagctcaccgcaatttctgccacccgggctcaagcgattctcctgcctcagcctcctgagtagctgggattacaggtgcccactgccatgcctggctaatttttgtatttttagtaagacagggtttcgccatgttggccaggctggtcttgaactcctgacctcaggtgatccacccacctcggcctcccaaagtgctgggattacaggcgtaagccactgtgcctggcctctttaagttacttaaaaatgtacagttaagttattattgactatagtcacccagttgtgctatcaaacagtaggtcttatgcattctaatttttttttaaccagttaaccatccccaccccagtctttcactacccttcccagcctctgttaaccatctttctactctctaagtccatgagttcaactgttgcaccagcattattgagacagttaatattagtcattttctgtaggcctgggctaatggtatcatagacctggttcctaggtagtaatgagaatgagaaggtcccggagaagcagaggccagctggcggcatttatcttccaaagcaaggtggctataaggtcaaaactgccagtcaggaggcctgattcacagagatctatggcaatgactgatggaatatgtttttcctaaggtgagtttgccagatttagcaaataaaaatataggctgcccaattaaatttaaatttcagataaataacaaagaattttttagtgtcagtatgtcccatacacatctgacaatatgtgtgtgtatttttatttccccaaaattgatccaagaatgaatgaacagatggccaagttgagcttactaatggaaagccataattcccttctgagtttccagatcttagccgattctcatacccagaaccaatcaactgaaagaaaggccaagtccccataagaaaggacattacaacaccatggcaagtatataaattagtgattcccacagtccttccccacaaggactcatttattcgtggaaaggggaatacctggacctttcaagggctgttggatacagggcccaagttgatgattataaccagggtcccaaagtgctgtttatggctgttagaggagaggcacataagagtcaggtggtaaatggggtccttgcccaggtccatctcactgacccacccagtcaccatctacccagttcccaaaagtatgataatggatatagcagttggcagaaccctcaccttggctccttaacgtgtaaataagagctattgctttaggaaaagccagtggaagcccttgtaactttccatgactccctgccaagacagtaaataaaaaataatattgcatcctagagagaatggtagagattagtgtcattttcaaagacttaaagaattgtggtcccattatacaccctatttaattcactgatttggcctttgcaaaaattgaggaatcattgtggatgagagtggactactgcaaatttaaacaagtagtagctccaactgcagcagttatgccaaatgtaatatttttaatcagagcattcactcatagccaagagacaatatactttcctggtcttgcctggggctgtgtcaacttgccagctctctatcataacatagtctgaagggacctggacaatctggacgttctgcagaacatcacattggtccgctatatcaatgacattgtgttaatcacatcaaatgagcaagaaattgcgagtatttggaggccttggagaataggagataaactctatgaagattctggggcctgccacgtaagtgtgtttttggtttttttggttttttttttttagatggagtttcgctcttgtcacccaggctggagtgcaatggcactatctcggctcaccgcaacctccaccttccgggttcaagcaattctcctgactcagcctcccaggtagctgggattacaggcatgcaccaccatgcctggctaattttttttgtatttttagtagagacggggtgtctccatgttggtcaggctggtcttgaactcccaacctcaggtggtccacctacctcagcctcccaaagtgttgggattacaggcatgagccaccgtgcctggccaggtgtcctttttaagagtgcaaggtcttggaccatccaggtcatttcttccaagtagaggctatgttattttaccttgcaccatcccctcagttaagaaagggaataccttataggcctcttcatttccaagtgacataaaactcttacagctttgagtggagcccagagcagtaaagtgctctgcagcaagtccatgctgtggtacaagcagctctgcagcttgggccacataccagcaaccctgatggcagttagaagtatctgtggtgggaaaagatgccttttggagtctatggcaagttccagcaggagaatcaaaatgttgatacctagggttcaggaacaaagccattctacctacagcagtgaattatataccatttgaaaagcagctcttggcatgctactagagtagatacacaggaagaagttgagtaactgacaatgggacatcagctgaccattaaacttgatctgcccattataagctaagcagtgtcagaccctccaagtcacaagtttgggtgggcgcaacaatccactgtaagaaggaaggaatgcagtctggctgaggcatgaatagtgccagaggacacaagcagcaactgcaggagcacatggcctccatcatccaccgctactacactaataattcaccttcagttcaacctgtggctacctgatgggctattcttgaagtccagctgacagaggagaataaagcctgagcttccttgacagatgtcatcttagtatgtggatgcaagccaaaaatggaatgctgcagtcctgcagtcctgcattcccactagggaacgagcttgaaagagtagtaaagggaaccgggtgtggtggctcacacctataatcccagcacttttggaggccaaggcgggtggattgcctgagcttgggagttcaagaccacccttggcaacatggtgaaaccttgtctctactaaaatacaaaaaattagctgggagtgttagcacgtgactgtagtcccagctactcgggaggctgagacacaagcatcgcttgagcaccagaagcagaggttgcagtgagccgagatggtgccacagcactccagcctgggcgacagagtgagactgtgtctcaaaaaaaaaaaagaaaagaaaagaaaaagaaagaggagtaaagggaaatcctctcaaagggcagagcttctgccattgtacgtggttattcactttatgtggaaagagaagtggcctaatgttagaatatacagagatccatgggcagtggtgagtggcttgatttattgattaggggcctggaacaagtaagagtagaagattggggacagaaaagtctggggaagatgcacgtgtatgggcccacgggagtcgttaccagatgtgaagatctttgtgtcacatgtgaacaccaagcagagaacatccgtcgtgggagaagcaccacaacacaaagtagaagaaaatgacttggcccgttaaagtcaactagcctctgtccatggccatctcaagactcaaacagtggggttatgaatgtagtagctatggtggcaatggtaaatgctagacctcggcacaacagggtgagctgtcactcacaaaggttgatccagctactgccactgccaaaacagagttcagtgcagagcctccaatttggcatcatcgttgaaggaaaccaaccagtcatttcttgacaagaggattacattggacccttttcaaaccaaaatctggaaagggctcaattcattgacaggacaaatcaattcatttgacatactctgggtatgagtttgattctcttacctgcagtgcctgagctagccctactatccaagagttcacatactgtctgatccgtcagcattagatcttccatagcatcacaacagaccatgggacccactttaaaacaaggatgtgtccgtggacatatgaccatgggatccactggccctatcatataccacaacacccagaagctgccagcctgatggatccatggaatagtcttttcaagacatagctaaggtatcaacttagagatgacaccctgctaggattgggcactgtccttcaggatgtggtgtacatattaagccaatgactgttatatgatactatgtctccaaaaggtaaaacgcatgtgtgcaagagctaaaggttagaagtagggatattcatgcttaccattacttccagtgacccacttaggaaatctgtgcttcctgtcccgctaactctaggctctgagcttctaggggccatggtttccagagacagaacactttcaccacagcacccattaaactttaagctacaccactgccaagagaccagcatgccaaaaaaaaaaaaaaaatgatttgctcccccagcagagtgaatctttccatatctgatgataaggaggaggcagggctgcagggacaactcagatagaatccaagggctcccctggggcattttttagtgcaattttgatggtaaatgggcaagtgcagcagccacaacccgaaaagaccacgacggccaggggctcagactcctcaagctatgtcttccctgaggtcagcagaggtgctaactgaggctaggagcaatccagaaaagggaacaagcattgcctatcagatgcgccctggggcaactgtgctaatggggctgtaatttgtcccattaggaaactttccttttataagcttctccaaaaaaagagataaccagaatcccgaaaaggctgtttaaggacaggatgaaattatcacatgaagcgaatggctccaagcagtgcaagtgttaaactgcatggatgctgtggctgcacccaggtcatcactccagggctgctccctcccccaactgctgggattcttgtactcagaggactcacagttgagctctttcaaagacattgccttcagcagaagcagctgcctcacccaacttcgcagccccctcacccaacttcgcagcccctcaattcataatacctgtatttttcatggcccctttgctcaattcaggataactcaggataacttgggaaggtgatcccaggctaagaactccccatggctctggctgaggctcctgatatgtctcatcgcagttcacctctctctgccagatgctgcccctctctcccttacagatgatgctcctgtgcttcctcagagagccacctgcccaaatctccatctttttttcccagaaaacccgatggatagcaatgcacatttacagacacgaaggtaaccaccaggaaaaaaaaaaaaaagttgaaaaacttaaaagttgttttctctagggagaagtgtaggggtgaagcaaggtagaacaggggctattgttatacagcccttctatatgcattgtttttaacatgcacgtattacttccatcattaaaacttttttcattttggccaggcatggtggctcatgtctgtaatcccagcacttcaggaggccaaggtgggcagatcgcttgagctcaggagttcgagaccagcctgggcaacatggtgaaactctatctctaccaaaaatacaaaaattagttgggcgtggtggcaggcacatgcaattccagctacctgggaggatgagacaggaggatcccttgagcccaggagggggaggttgcagtgagccaagatcgcacgattgcattccagcctgagcaacaaagtgagacttcatctaaaaaaaaccccaactttttccatttgaatattataagaatttgatactgtcactcacctttttaaaactatttgaatacttcctacagccctaagaaaatccttaagaatccctaacatagcttgcaaatcccttcccatctggcccctgctgagtttcctatctcttttatttttttcatttttattttttgacagggtcttgctctattgcccaggctggagcatagtagcacaatcatagctgactgcagcctcaacctcctgagctcaagtgatcctcccacctcagcctcccgagtagctgggactacaggtgagcaccatcacatccggctaattttttgtatttttttgtagagatagggtttcaccatgttgctcaggctggtcttgagctcctggcctcaagcaatctgcctgctttggcctcccaaagtaccatatctggcgaatttcttatattatttcttacactcctcgttctccctgttacctgccgtgctggattttccatttctcttcctcatctctggacttcaaacatgctgctgcctctatctggaatgctttccactccacctggttcattgctgttcctccatcaaatttcagcttagatgtcacctgctcagggggaccttctcttccccatcccaccccagactatcttagatcccttctatcactcccacagcacctgaacgtcttttttcttagcatcaatctcctgaagttatctggggggttttttagagatgggatctcactatgttgcctaggctggagcgcagtggctattcacaggcacaatcacactcactgcagtctcgaacccctgggctcagtcagtcctcctgcctcagcctcctgagtagctgggaatacaggtgtacaccatcatgcggggcatggttattggttatgaggttatctgtttaatctccacatttccttttttatccaagaggactatttatcttgtttctcctgtattactagcacccagcatataactacagtacagtagacagaaaatatgtattaaataagtgaatttcatcaaaatgttttctagagtcccagctctgtaatctgcaacttagataacctgcctgagccttagtttgctcaagtataaaatggaaataaaaataaaaataatacttaccttagagggtcgttttgaggattaaataagatatatcagaaaagctcttagaacggtgcttggatatagtaagcatttgattaatgcatgcttaaacataaagaaaggttacatcaattcacactcataccagcagactttgacactatcactctttaccctgttcaacattgagtcttgtgtttttaaatatttttgtaaagaatataggtaaaaagtggcattttttctttggatttaattcttatggatttaagtcaacatgtattttcaagccaacaagttttgttaataagatggctgcaccctgctgctccatgccagatccaccacacagaaagcaaatgttcagtgcatctccctcttcctgtcagagcttatagaggaaggaagaccccgcaatgtggaggcatattgtattacaattacttttaatggcaaaaactgcagttacttttgtgccaacctactacatggtctggacagctaaatgtcatgtatttttcatggcccctccaggtattgtcagagtcctcttgtttggccttctaggaaggctgtgggacccagctttcttcaaccagtccaggtggaggcctctgccttgaacgtttccaagtgaggtaaaacccgcaggcccagaggcctctctacttcctgtgtggggttcagaaaccctcctcccctcccagcctcaggtgcctgcttcagaaaatggtgagtctctctcttataaagccctcctttttcatcctagcattgggaacaatggccccagggtccttatctctagcagatgttttgaaaaagtcatctgttttgctttttttccagaagtagtaagtctgctggcctccgccatcttagtaaagtaacagtcccatgaaacaaagatgcagtcgggcactcactggagagttctgggcctctgcctcttatcaggtgagtaggatggagtggaaagggtggtgtgtctccagaccgctggaaggcttacagccttacctggcactgcctagtggcaccaaggagcctcatttaccagatgtaaggaactgtttgtgctatgttagggtgagggattagagctggggactaaagaaaaagataggccacgggtgcctgggagagcgttcggggagcaggcaaagaagagcagttggggtgatcatagctattgtgagcagagaggtctcgctacctctaagtacgagctcattccaacttacccagccctccagaactaacccaaaagagactggaagagcgaagctccactccttgttttgaagagaccagatacttgcgtccaaactctgcacagggcatatatagcaattcactatctttgagaccataaaacgcctcgtaatttttagtccttttcaagtgaccaacaactttcagtttatttcatttttttgaagcaagatggattatgaattgataaataaccaagagcatttctgtatctcatatgagataaataataccaaaaaaagttgccatttattgtcagatactgtgtaaagaaaaaattatttagacgtgttaactggtttaatcctacttctgcctaggaaggaaggtgttatatcctctttttaaaattctttttaattttgactatataaactgataagtcctctctacttcacagattaagaaattgatactcaaaaaagttaaataacttgttttaaaccacatagtaagtgccgaagccaatctgtgagaccaggactgtttgtactctaaatggctgcaccacatgaggcaaaatggctcgtgatggttttatttcaaagacctagaaaacactatcacagctggtgctcccgtctcagacccacagcaacgatgtctccacttcctgcttcatcttgggtttctcacgtcttgaatgtgcacacaaatcacctggggatcttgttaaaaatgcagcttctgtttcaaaagacccagactggaaatggagattccgcatgtctagtacgctctcaagtttattaatctgctgctggtcctaggaacatattgagtagcgaggggcaggatgtgactcctgtaaggagtggccaggcattttcttagagacctgtgttataaagtatgcttttccttaaaaaaaagaagaaggaggaggaggagaagggccaggtgcagtggcttacgcctgtaagcccagcattttgggggaccaaagtgggaagatcacttgagctcaggagttcaagaccagcctgggcaaagtagtgaaaccccatttctacaaaaaattaaaaattagccaggcaaggtggcacacacctatagttccagctacttgggaggctgaggtggaaggatcacttgagcccaggaggtcgaggctgcagtaagccatgatcaagccactgcactccagcctggagtgtctcaaaatagataaataaataaataaataaataaataaataaataaataaaagagacagtatcaaagacccaatcacctctagacatctggcatcataggaatgtgcccagtctgctctggggataggaaagtggggatcctgtctccccctgtgtagaggtttcagtaaaagaaaggcctaggtgtgcagaaagctttcaggcaatgccagggaaactgatcattgtaatgaatccagggtattgctgagtgagggcatcctggagggcccggtggaaatgtggtcaggctcttcaatgcacaggccctagttgatgagtaatcagggtttcaaatatttccatctctgtctcaagcagaaaacaaatggaaaaactgaaccaccagaaaagcagagccagagatggaacaagaatcccagtgtttgtacccaaccaagagcgtgtttttcttccacagacaccaatgttcaaaatggaggcttgggggcaaaattcttttgctatgtctctagtcgtccaaaaaatggtcctaactttttctgactcctgcttgtcaaaaattgtgggctcatagttaatgctagatgcttccttcctctatttccccccaaatttcctgggaacccctggtcaataccagcagtaagttccactgttctagggtgtagaaatggctgtgacccagcagcaagagggaaggacatcagatgtcatcagtggtcatactgcaacacagccctttttctgtttaggaatgcaggtacccacaacatttactaacactttttttttcttatttattttctagttggcgtttgggggcaagatggtgagatatgctttctttctttcttttttatgaaatcaccccatcattctttgtagttatgaatggagctttctcttaggcctcccacagaacttccacagaggtcaggaaaaggagtttctgccatctacccctttgactttcctcacaagtctggagatatttctagcccagaagagggaagcaacagaggcaggaaataatgagtcttaaccatacaaaagaaaaattgagacttaaatgaagttgaaagcactaacagttttcatttgtttgcatttcatatttgatgtgagattctgcagaggagacgtagccagaatgcatgcacagggttactctggataagctgctggggcaacatttggatgtgtgttcagaatcacatgtctgaatactctgaatatatgtgtgtacatgtgtatttatgcaagtgcacatgcatatgagtgtgcccggcctgaacttactctctcaaccacagcggtagagtcaggagtgttccaacattggaagcccctctattcaatcagctcttccaaactgagtgaaccaatgttgtatttaatggcaaccatggctggacaccatggctcacacctgtaatcccagcactttgggaggccgaggtgggcagatcacttgaggccaggagttcgagaccagcctggccaacatggcgaaaccccgtctctactaaaaataccaaaatcagccagacatggtggtgtacgcctgtagtcctagctactcgagaagctgaggcaggagaatcgcttgaacctgggaggcagaggttgtagtgagccgagatcacaccactgcactctagcctgggtgacacatcgagactgtctcaaaaataaaataaagacaaccattatgccagcctagattccgccatgctgcctaatttgtagtgtccttaggagccatttttgtaaatagtcatcagataagatgtaaggcccataacagctttttctatgcagctgagggaattggaagatccattgtttcctaagagttgagggaagagtcccaacccacgggagcagggtctgatcttcattgccgatagaaacattactaatggcttcttactgtttccttttcaggtaatgaagaaatgggtaagaagatttccactctatctagcaaaagttttcaaatatggaatgaaatgctcatagagtacaatcacagtaacaaaccctgagaactaaaactattaaagggaaaatacaagtatctttcaatgggatccgtatgaaacttgcctgtatttgttgctagctgtcatgtcagattatagctgtgcatatatgtatctctgatcatacacatatggatgtgggttggagctaccatgtgtttttgtataagccatgaaatctttgaaggcagacagagacagtgtctcatttacctagcccagtgtctggcacatagtaggtgctcaatgaatattttttgaatgaataaatgaacaaacatatgaacacattgctaattacctcccctcaagaagctgatggtcttgtgtgagagacaaataattgaaaatatagtgagttgcatgttataatatgggtagatacagagtaaaatgaagtataaagaggggagtggtcaactctactgagtgtcgttgggaaaggttccctgggggaggtggtccttgagctgaattttaaaggataagcttatgttttagggaagaaaaatattttatgcagaagagataaagctgtatagtatgaggataagagtctaactgagctagatcagaatgtttgaatcttggctcaactctctacttgctgggtgtgtttgagtaatttacctaacttttctgtgccacagcatcatcatggtacaatggaaataatagtgctacctaacttgtagggttattatgaggaccaaatgagtaattcatttaaggcacttagaacattatctgacataaaaggcagtaggagggccgggcatggtggctcacacctgtaatcccagcactttgagaagccgaggtgggaggatcacctgaggtcaggagttcgagaccggcctggccaacatggtgaaactccatctctgctaaaaatacaaaaattagccaggcatggtggcaggtgcctgtaatctcagctactcaggaggctgaggtaggagaattgcttgaacctgggaggcggaggttggagtgagctgagattgtgccattgcactccagcctgggcgacagagcaagactctgtctcaaaacaaacaaacaaacaaacagacagtaggtgaattttagctattaatacatggaaagcatgctgactatagatgataagcattaaagtttactgagcatgtatgttttaggcattgctctaaatattttacttgaatttcctcatttaattcttccaacacccctactgtacagttaaggaaacaaagcctcaaataaatacagaaataaacaaaaataagtaaacaatccagtcctggggatataaatgcagatttaggccaagtgccatggttcatgcctataatcccaacactttgggaggccaaggcaggaggctcgcttgagctcagaaggttgaggctgcattgagcaaagattgtgccactgtactcgagcctctgtggcagagaaagaccctgtctctgaaaaaattaataaatagaaatttaaaaataaaaaaattttaatgcagatttatatgataccgaagttcattttctcaaccattatgaaatactgtttctggatatgtataaaatctttgtgagcacacatatctttttttaacttaactttcattttaaattcaggggtacatgtgcaggtttgttatataggtaaacttgtgccatgggggtttgttgtatagattatttcatcacccaggcattaagcctggtacctgttagttatttttcctgatcctctccctcctcccaccctccaccttctgagaggtcccagtgtgtgtcatttccctctgtgttcatgtgttctcatcatttagctcccacttctaaatgagaacatgtggtatttggttttctgtcactgtgttagtttgctaaagataatggcctccagtcccatccatgttcctgcaaaggacgtgatctcattcttttttatggctgcgtagtattccatggtgtatatgcagcacatttttttatccagtctaccactgacaggcatttaggttgattccatgtctttgctattgtgaatagtgcacaatgaacatacgtggagcacatttctgtctaagcacagacatctagacccttgtgtgagcatgagttaagtctaagctctgctactgaatttgtgccaataaaagttgtgagcaattttctttacatttttttcaaacaaacacacccagcagagtataatgtctatgtactttatttatgatttctagttcatttaacatgtctaagaaacatccgtgttgaaaaattatttataaattaaaataatataaactatctactgtccttatactcaactcccaattataagcaggtggaaaaacctggagaatgttttgtttacattctgtgcagtctttgtcagagggctgcctgagcaactgggtcagagtttagttctgctctgggagtagcaggacctcaagaaggaaaggaggaaaggaagtaactttttcttgagcacctgctatgtgtcattcactttcaccttcataatccatttaattttcgcaaaaactttgtgaggttggtgttttatctccatttccctgataaagaagttgaggttcagcaaagttaaatgacttgccctcagtcacacagactagggcagatccaggattcaaactcagggcttctgactcttgagtccagagctctgtccctgacagcagcagcactgcctctcctctcttccagctgttatgtccagactgtagcagaacccagtgttccagccacaagttttccaggaaataataaaggactcctagctccacctcccagggcaaaaatggctgctgtgggaaacacaggctggacctacgaatggcattagtggtttattagttgatttcagttgtccacactaataggcctccctctaacaaaaataattgagagctgattatgctcagatataatgtaaagtgaagccactttttattggaagaagcattccctcaaaacgtgtagagtatttcacattatttaaaggcaaatagagagaaaattatatggaataagaacaaagatgtttcttctctattatgagggactcagttctgagaaaggattttaaattgtaagaaataggtaagtccacgaatcagtgattcagtggtgtggagagctttatttctgagaaggccagtagcgctcccttctgacaagcaaatctaagacctggatgacagatgacttcctgcatttggttggttcttttgtcattcatatctatctgtaatacagttctggctaatttaagaggataagcttgaagacctctggaatttttcggctttaggactttaaggctttctgagcttcagtagatctagatctaggagctcatgctggtatattctgaatccgatgtatctgagttacatctatgagctacttaataaatatatctatgagctaaatctcataggctaagcatgaacctcacctccaagactcggggttcctaaatggatgagaccctctttgggaagtcttgtgggcagtgtctaattccactagaaaagttttacctacaatttaaacttaaaccatgatattttcttactgctgtttccttttttcattttcaggtggtattacacagacacgtgagtttattggtcttttatttatgccctgtctgaggatgcagattggtgggtagatgagaaggaactgattgagagagattaaccccaagaactgatatcttcccagcattgcattctcaactccattttagaaaggttccaaatagggacttctgtgggtttttctttacatccatcttacccttcccaagtccccatgtccctgcgtaaaccctaaagccacctctcaaaaggttctctagttcccttcaaggttctctagttcccttcattccacatatctcctcttccacaccctctagccagtagagctcccttctgacaagcaagtctaagatctagatgacagatgacttcctgcatttgggtggttcttttgtcactaatttgccttttctaaaattgtcctggtttcttctgccaatttcccttctttctccccagcatataaagtctccatctctggaaccacagtaatattgacatgccctcagtatcctggatctgaaatactatggcaacacaatgataaaaacataggcggtgatgaggatgataaaaacataggcagtgatgaggatcacctgtcactgaaggaattttcagaattggagcaaagtggttattatgtctgctaccccagaggaagcaaaccagaagatgcgaacttttatctctacctgagggcaagaggtaatccaggtctccagaacaggtaccaccggctctttagggaggaccattcaaaagggcattctcagtgattttccctaacccagctcacagtgcccaggcgtctttgcgcttcctcccacactcaatcctgggactctctggtaccacacggcatcagtgttttctggaatatagattaaacaccaatatgaggcttctgggtaaccccagtctgtgcgagatctaaaatagcaactccctaagagacaggactgggtcatttgcaccgcatcacacccaggttcatagcacaccaacatgagtttatctaatgcttcctccagagataaatttttcagaaaggtttgcaaaaaacactcaaggccactatagtaaaatggcataagctaaggtataataataaaataataacaatacttaacatttattgagtgcttattaagtctcaagcactgtctgtacccaacacttatcaaggattctttttcatgtaatcctctcaacaactatatgggttaagtatcattttattcccatgagtaaagggatgaggaaacagagggtttgtgagttgaaaacacatttcacgcttctcacagctagtgagtaataaagctgggactcaaacccagggctgtttgactccagtgcctctacccacggccaccactctttgcttgtcaatgttgttctaaacatattgaagggggggctctgaccgtggcaagcgtgtgagtagtaaggggagaatggccttcatgcactccctcctcacctccagcgccttgtgttttccttgcttagtgatttcccctctccccaccccaccccccacagtgtgtgagaactgcatggagatggatgtgatgtcggtggccacaattgtcatagtggacatctgcatcactgggggcttgctgctgctggtttactactggagcaagaatagaaaggccaaggccaagcctgtgacacgaggagcgggtgctggcggcaggcaaaggggtaaggctgtggagtccagtcagaggagattcctgccaagggggacgaccagcctgggccagggtgggtggcaagtccacagctaggtcagaacagcttctctagagcttctatgcacagcttctattactgtgatgacaagatctcaacagacggtttcaaatctcacatcactcccctccttcccatcctagaaaagtgcaaaaaagtttatgaaagtgatgggcttcctcacatacctgtcaatgcctgcagtcatccgattccgcccctaagctgtgggaagagagactttgatatattagctcctgccttttcctttcccttcccctatggagagaaacaatgggaggatcttgagctgaggaaagtcacaaaatgatgagaagagtgtagggtccttagagatgaatgaaagaaaaaaaaagagaaaggacgtctgaacagaaaagggagcggtagaggagagaacaatggggtttgccattctctatctgggtctcactggcacagacagtgctgcaagattggttccctcatgggaatgaaatgtttcccctccttcctccgcaggacaaaacaaggagaggccaccacctgttcccaacccagactatgaggtaacgtgggatagaaatgggccaggacgctggaggggatgtccctccaggggggaaggaaacagatgggatggcccatcttgtctgccagatgcctcaaagcccctcactcagggcttccattacaaccctctatgtgccacctctgcgtccttcatggtaaaacaggactgtctcaaaggctgcatggcttccacaaccatggagaggtggaagcttgcaggagacatactcctctttctctggcttattcattgactgggatacagccatggagaatattatatatgcaaattctaacacaataaattctgggctgatattccaccagcatgcaccagtatagcgagttattgaaatattaaaattatataaatattatataaaagttattgaaatattaaaatactcattgggaaatagccccaaactttgctcaccccaacccacccttacacacacacatacacacacacacacacacacacacacacacacacacacacgtgaccagacatcccagtccctcccctaccgggctgcctcttgagttggggtaacaaagagttaatgcctggcatggcagaggatcaccaggattgttctagttgattggtatgtgtgcactcctagttgttaaatattttcactatcacacctggatatactcaacaaatatttgttgagccaaatactcaacaccagccaaacacgtagtatttactttagcttaagcgaattatttagccctgacagaagccctggaatgtgggtctttaagttcctatttttgagatgggaaagctgaggctcacggaaggaggtgaccagctcaagtctcctaccgtccatgccaaattagaattccagcctgcctcctgacttcaagtccaaagttcttcccacgcactaaagctagctcttcagtgtcctttcttaggaggtacttcctcccgcaccactgaccgccccctctctatttcacccccagcccatccggaaaggccagcgggacctgtattctggcctgaatcagagacgcatctgaccctctggagaacactgcctcccgctggcccaggtctcctctccagtccccctgcgactccctgtttcctgggctagtcttggaccccacgagagagaatcgttcctcagcctcatggtgaactcgcgccctccagcctgatcccccgctccctcctccctgccttctctgctggtacccagtcctaaaatattgctgcttcctcttcctttgaagcatcatcagtagtcacaccctcacagctggcctgccctcttgccaggatatttatttgtgctattcactcccttccctttggatgtaacttctccgttcagttccctccttttcttgcatgtaagttgtcccccatcccaaagtattccatctacttttctatcgccgtccccttttgcagccctctctggggatggactgggtaaatgttgacagaggccctgccccgttcacagatcctggccctgagccagccctgtgctcctccctcccccaacactccctaccaaccccctaatcccctactccctccaccccccctccactgtaggccactggatggtcatttgcatctccgtaaatgtgctctgctcctcagctgagagagaaaaaaataaactgtatttggctgcaagagttgctgtccctgttttctgagagaccctcagaggctgccttaactcccaagaccattcaggttctcactatctttgactaaattctcagctatgaccccagatgcgagcactctctgtttccacagctggtagggccgttacctgaagctctctttagagagggcataagggaataagaaaaaaaagagagagagagagtgaagggaggggaaagaaaagaaaaagagagagagaaagaaaaataaaaggaaagggaaagaagggagggattgaggaagggaagaaagaaagaggatgggagggagagaaagaaagaaagtttcaccaacttctcttggaggaaaacatcaaacgtggcagagaaagactgatgggtccctgatggagtggttggtagaaaatggacaagacagaaataggccttgaaagacagatgaaggtacggaagaggacggtggcggtggaagccgggcttggagatgggacacagatttccacaagctgccaggaaaagctgcgagccagggctggggaagtgaaggagggaggtgtctcaagcaggcacacccccaccctgaggcagccgcctgcagccagaggcgggctgtggttaagcagtgcaggatgtgggctgcactgctaagcgtggcttctgggagtgagggtgggagaggtacagcggcagctgggcggaggcccgtgtgagagcgctttgttctcagtctcccacagcacactctgcttgcagagagaggaggctggagcatccaggaactgtcctaatccagctcaaaccagtgggctctcttctctccctccctgcactaataattcaccctgctgatttatgagtgcgaccaccactaaaaaggccattcgtgaccagcagcctccacatactgctccccctcagccttgggctgtagctacagcttctatttgtttttggtcgctgttgaagagtcacttccttcactctaagcatcaacacttaggttcagaagatgcctccatgatgttgtccatcactagctgctggatggcagttttgtcccaagtatacttgattgtgccctgtcaaggggaggcatggctcagcgtaatacaggcaataacagctgacatgtgttgagcatttactcaatacatgcttcagaaattgtacgtagcactttacctgcattatctcatttaatctttatgttgacacaagaagttagatgtcatcctcattttacagacgaggatactgaggctcagagaggtcaaatcattgcccaagtcacagatggggtggggcagagctggaactagcagccaattttaatggtcagagcatctactcattactgactgtgatcataaagaatgttccccattgtcgcacactggggcctgtcgggggtgtgggggccaagggcaggaagagcattaggacaaatacccaatgcatgaggggcttaaaacctagacgatgggttgataggtgcagcagatcaccatggcacatgtatacctatgtaacaaacctgcacgttctgcatatgcatcccagaacttaaagtaaaatttaaaaataaaaattttaaaaaagaatgtgtcgggcacggtggcttacgcctgtaatcctagcactatgggaggccgaggcaggcggatcatgaggtcaggagttcgagaccagcctggccaacatagtgaaaccctgtctctactaaaaatacaaaaaattagccaggcatggtggtgggtgcctataatcccagctatttgggaggctgaggcaggagaatcacttgaacccaggaagcagaagttgcagcaagcggagatcgtgccattgcactccagcccaggcaacagtgcaagactccgtctcaaaaaaaaaaaaaaaaaaaaaaagaatgtttctcattgtcctgacttaaaagctctgtatttaattgtttatgcattccttcaatgagtgcttttctaatcactcatgtggctatcagcactatgctaactgctaagaggatatcaataaacagttcttgtcttcaaggagcttgcaattatataaaagcggtcaaacatgcaaaaagttaaagagcaacacaagaacagatgatgtgattaagcactcatgcgtgttacagagtgttgcaggtgttcagaggcagaaaaagctccacggaggaaagactttatctaggccttgaagggaaggatgaatagaacttggagataaagaaggcactccaggccagacacggtggctcacacctgcaatcccagcactttgggaggccaaggcaggtggatcatgaggtcaggagttcaagaccagcctgaccaacatagtgaaaactcgtttctactaaaaatacaaaaattggccgggcacggtggcatatgcctgtagtcccagttacttgggaggctgaggcaggagaattgcttgaacccggaaggcgggggttgtgtgggtgagccgagattgtgccactgcactccagcctgggcaatagagagagacttcatcttcgaaaaaaaaaaaaagaagaagaaggcactccagattgcagagaaggttatgaacaaagacttccaggcaaccagctccgcactagagaagcaaatcgacttaaggaaagaagaaggaaagtggctatttgagggcacatgctatgctcaggtcctttctcaagttctagccacgccttacttactcactccttaatgcatcatgcaaagtaggtattattttatcagtttcgcaaaagagaaaactgactttcagcaataataggtaacttccttaagttcccagagcaaggaagtgaaggccctggaacctaaacccagatcctctagcacactctcccacaaatgtctgattctgctttgctgaaatacagtgaatatggcaggtccccaaagtacatcctaggaccttgtggttcctggctgtgcctggccacatcaaagcagggaggctgacaatctctgtcccttcttggctccctcttccactcccctgagtggttgggccacactttcagtgctcctgtcaaaaggccacccaatccctgctctcctcaccgtgagcagctgagggcaactccagcttcacggagaacagagaataggcccacggggcctgcagccaaccccttacctactccctcatgtgcttcctcacctgcccttcctgccccaaggatgggacttttcccactcacctaaaaccttgatagcctcccctttcttctgctccagtgtctcatgacatcacctctccctctccccagtattacccaactgtcccctttaacttgatctttcccctccactgcatgctcacatctctcccatgctaagataagctctcccttgaccctgcatgcctcctgcccagatacttccctttctctctctgcctttttaagtcccaaagagaagtctactaggccaacttcctcatttccctctgatcctcagccctttacagtcgggcttcctcctctcccactccagaaactctcaaaaacatcacagtgccctcctccttgccaaatcaaagaagcactccatgagcctttcaagagcagacctcttggaagtatgtgaaagattgactgctcacttccttggcttccatgacatcctctgcccctccttacctctcttgaaattcctcctccctgctccttaaacactggtgttcttcgaggttctgttctcattccaatacccttcacacttcacctatttttcttactttcccatatctctacccccagacctgaccagatcagatatcctcttaggctttagacatattctggatgtatccattgggagcccacagacttcacagacatttcaaatttgagatgttcaaaactgaagtcaccattccaccccccacccacccccaatccctcaaaccatctcctcaacctgcatgtccttccccagcgaagggtaccaccatctacacagtgctactggatcagaaaccctggaattggcctggatgcctcctgcaccctcattttccacatccaaatggcactccctaaatagctcttcaaactgatttctctctgtttctgcctccagaattatgtgtgccatatcacttcctgctggaagctcttcaaggatgcattacctcatacagaaaaagcccataccccctacttagccttacactccaggtcttccgcctttggacccttaccacctctcccttatttctaacactctgcaacttgaacttcatgctctagtaaaactaaacctcttgaaattctccctgctctccacctccgtggtgtctctccccatctttgctcatgctttcttctctgcctagactgttctttccttgtctccacttttcttttctttttcttttttctttttttttagttaagcagactttatttgagcaaagaaaatttatgaatcgggcagcatcctgaaccagtaaacgttcaaagtgctgcacccagcaacatgggcaggccgaatttattggaagtaacacacagaaacagtttgatggggtacagttcagcatttgccttatatggacatggtctgatcagcctgtgactggttaaagcacagtggctgtgacttgctgagattcaactatttgttacaagaatatagtctcagttgggaggcagtttacttaaatactaagttaggttgcagttcaacagatatgccagcagctttgggccaaatttaatttaaacatttctgccttttggtcagcatctcaattttgagagattgaacagaaccttggcccctgaccccattttctgtcaccatcataatggacttgttttgtttcaatattgaattcacaattcacaacttcaccttagttggatgattctttatgctttcttcatgtttttgttatactaaccctaatagaccagttgatgtataaagaatggctgcataggagcacttaagacctcccaggggaagcaacacgagagacaattattattattttaatttttaagatggagtctcaccctgtcacccaggctggagtgcagtggcacaatcttggctccctgcaacctccacctcctgggttcaagcaattctcctgcttcaacctcctaagtagctgggattacaggcacccgccaccacagccagctaatttttgtatttttagtagagatggggtttcaccatgttggccaatctgatcttgaactctagtcctcaagtgatctgcctgcctcggcctcccaaagtgctagaattacaggcatgagccaccgcgcctggccagggagactattatgatgactatgagtggacaatgccaagaaactgaagtacactccttatcaggagtttccacaaacaactagtcaaaatcaaacaactcaaagtccgtgcaataaagatagttcagtagtatttgagtccagctggtcagtcttggttcaggagatgatggtgattagggccacagttcactacaaaaagacctgatttaaactcactccattaaatgagagagctatattagagatgtctcagagacctccacccagcaacagtggacagccagtgtttataaacagaaaaaggaagtggcattggatatagcctgatcggttacaggtcaccctttgcctaatttagacacatctgatcagtctgcagtctgcccctggctgaaagctggctgctatggttggaggagacttcctttcttcttacaaaaatatgccctcaagtcaggttgtagtttgtttacatattaaatgaggttacatcccagtcaaatcctccctacaaagtatcccctattctgacctctatcaccatagactagtttttctggtttttcaactttaaataaatggaatcacacaataaaaaaaaaaaaagaagaagaagaagaagagaaaaaaggaggttgcagttcactgaattgcagcattttggaacaaatttaatttttttttttttttttttttttgacgcggtcttgctctgtcacccaggctggaggagtgcagtggcacagtctcggctcactgcaacctccacctcctgggttcaagtgattctccctcctcagcctcccaagtagctaggactacaggcgcccgccaccatgcccagctaattttcgtattttcactagaggcagggtttcaccatgttggccaggctgctctcgaactccccacttcagatgatctgcccacctcagcctcccaaagtgttgggattacaggcgtgagccaccgcgcccggcctggaacacatttaatttaatttagcagaacttactccctgggcccagaggacgtagaggcaagagttgcttcccatgatgagtgcacctgatgagaaggcacctccagatgactcaaaggaaaacgaagaatcaggagagaaagagaagcgcagttcttgcctgcttcaggggaggaccccaaactcctggttaatagtagggacctgcttccccgtgcaccccagctccctctccaccgtacagtcgcctcctaggactggcgaccacaacttgaggcctcctctgaggcccagagttcgcgaagtcagaagacaaccagctgaagtggtttgggccttgtgacagcaccagatccagggcgaggtcgtgctgctggtcctcagagtacacgggccggtagttctgcagctgcagtgcgccgccgcacacctcctgcacacgcaaagggcagcaggtggtgaagaccttggtgaagggcagcgcgtggcgctgggcctgggagacgttgagctcattcctagacaaagtctagaaggcctcaagtggccagccgatccctgacccatgggtgatgttgtggatccaggcctcgagctgcggcatgactcaccttgcctctacttctcacatgacttctattcatgcatcaaaactaaacagatgatgattttctccaggaagctttcaaaatccctcccagatgaggctaaaagccgctactccttggtaccaaacaactctataactctgtcatattcctaccatcatattagatgtatctgtatgtttaatgaaaggatggatgataaatggatgggtggatgggtgaacggatggatggatgatgggtggatgaatggatgaatagatgatggatggatgaattttttcactactagataagaggacagaatctgtatttttctttgatataccagctcctacacagttcagaccctagttcataatatatcctcaataaatgttgacatgaactgaccttgaagatgatgctgatggaatttccacagaagaccaataagatactgatgggaaatccagatattactaacatagatagaaaaataatcaaaatgaacatactaaaaacttgcaagcacagcgtccctactcaaaggaacttgctattcctctaactctctggcttggattgatgtctaggaacagccagctaaaatcaacctcatcctaggcaaagatactttggttggcagtagggaataagagaaaaagtttggtgtggaatgagaaaaggtaagagctttctttactgggggaacccatagttatagattattcagaaagggaagctctctaaaaaccaagagccccttttcagatatgtcgactcttagttccttcagacatccctggtacaagtcttggccccatcccagagctgggacatgattaggagacagagatctgcccccctggcatttgcccattccctggtcatgtaaagtacaagcaactagatataatgacaaaaatatttcccaactttttccaatgagttcttgagctatttaaccctgagcacttattttatttaagaatatctcaaaatggaagaattggaggtgaagctgagaagccagggaaaccctgataactcagagacaattccaacattgcagtgtaactatcactccatcatcacaccctgttcactcagcaggctatggactcaggggttctatttaccctaatcccatattcctcctcccaaatttaaagccgaccagaacaacaggtctcttaattccctctttagctaagaatttctagccctgagaaatgcaaagcaaaaccacaatgcgataccaccttactcctgcaagaatgaccataatcaaaaaatcaaaaaaaaaaaaagatgttggcgtggatgtggtgaacagggaacacttctacactgctgatgggaatgtaaactagtacaaccactatggaaaacagcatggagattccttatagaactaaaagtagaactgccatttgatccagcaatccctctactgggtatctacccagaagaaaagaagtcattatatgaaaaagatacttgcacacacatgtttatagccacacaatttgcaattgcaaaaatgtggaggcaacccaaatgcccatcaactaacaagtggataaagaaaatgtgggaggggtgtgtatatatgtatatatatacgggggtgtgtgtgtgtgtgtgtgtgtgtgtgtgtgtgtatacatatgatggaatactactcagccttaaaaaggaatgaattatgaattaatggcattcacagcgacctagatgagattggagactattattctaagtgaagtaactcaggaatggaaaaccaaacatcacatgttctcactcataagtgggagctaagctatgaggaagcaaaggcataagaatgacacaatggactttggggactcagggttggggataaaagacaacaaattgggtacagtgtatactgctcaggtgataggtgcaccaaaatctcacaaatcaccactaaagaacctactcatggccaggcatggtggctcaggcctgtaatcccagcactttgggagtctgaggtgggtggatcacgaggtcaggagttcaaaaccagcctggtgaaaatggtgaaacaccgtctctactaaaaatacaaaaaattagccaggtgcggtggcaggcgcctataatcccagctactcaggaggctgaggcaggagaatcgcttgaatttggagggcggaggttgcagtgagctgaaatcgcgccactgcactccagcctgggtgacagagtgagaatctgtctcaaaaaaaaaaaaaaagaacttactcatgtaaccaaacaccacctgttccccaataacctatggaaattaaaaaattttaaataaagaatttctagccctgaacattggttttatttgtgaagtctgatcccacaggtacctgttgcttactgacatcatgggcagaaatatcctagcaaatgtccttggaatgacaggtggaagagttggaagtggagttgaaatcttgagtaggtttcctacctggacagaagcagagtagtgcaagataaatgtagatgctgaggtgagaaaaataagcaggatgaggaggctgtagattacatatgggatgcagaggataggagggatacacattatagaaggaacaccacgttgcatttgaatgcagtgtataggtgggaaacagtggaaaggaggaatacagaataaaggaaagattaagagtgtagaaggcccaagtcaaacttgtagagatgaaaactatgatatctgagagggaaaaaaatgaattggccatatctggccaggcacggtggctcatgcctgtaatcccagcactttgggaggccaaggcaggcagatcacctgaggtcaggagttcaagaccagcctggccaacatggcgaaaccctgtctctactaaaaaatataaaaactagccgggcgtgatggtgggcgcctgtaatcccagctactctgcaggctgaggcaggagaattgcttgaacctgggaggcggatgttgcagtgagccaagattgctccactgcactctagcttgggccagagagggagactccatctcaaaaaaaaaaaaagaaaagaaaaaaaatgcattgcccatatctaaccagcagatttgatattacagaagaaaagattagattagtgggcttgaagacataacaataaaaacacaaagagaaaatgaaacgcaaagaaaaaaattaaagaatagaaaagaatatatcatgctaacactaatgaaaagaaaaccgtatattaacatcagccaaagacatacttcaaagaccaaagaatgttacctggaatacagagagatatcacgtcatgtcacaatgacaaaggagtcaagagaatatagcaatcctaaatgtttatgcacctagtaacagggatgcaaaattggcaggcatggtggctcacacctgtaatcccaacactttgggaggccaaggtaggcagatcacttgaggccaggagttcaagaccagcctgaccaacatggtgaaaccctgtctctataaaaaatacaaaaattagccagatggagtggtggacatctgtaatcccagctactcaggagtctgaggcaggagaatcacttgagcccaggaggtggagactgcagtaagccgagatcacgctactgtactccagcctgagcgatagagcgagattctgtctccaaaaaaaaaaaaaattgaagcaactcaccacaaatcaatgataagcatttgaggtaatgcatatattaattagcttgatctagccactccacaagatatacatatttcaaaacatcatactgcacaccataaatgtatacaatttatattagcttattaaaagtaaataaataataaatttttaaaataaaaaaaccccaattacacaatttaaaaattgaagcaatcccagcattttgggaggctgaggtgggcagatcacctgaggtcaggagtttgagactagcctggccaacatggtgaaaccccatccctactaaaaatacaaaaattagcagagcatgatggcaggtgcctgtaatcccagctactctggaggctgaggcaggagaatcgcttcaaccctagaatcagaggttgcaatgagctgagataacgccattgcactccagtctgggcaacaagagcgagactccctctcaaaaaaaaaaaaaaaaaattgaagcaaaaactaatgaaacttcaaggaataatatacaaattcacaactgtagttagagatttcaacatccctttttcaaaaggtagtaaaacaagtacaatcagccctccctatctgagggtttcacatccacggatttaatcaaccatcaatcaaaaatacttagaacaaaagtggatggttgcatctgcactgaatgtgtatggacttttttatcattttttcctaaacaatacagtataataattatttacatggcatttacattgtattaggtgttataaataatgtagagacgatttaaagtatattagacaatgtgcatagattatatgcaaatactatggcattttgtataagagacctgagcatccatggattttggtatctgaggattctagaaccaatctcctgtgaataccaaggtaccaccatagaccaaaaatcagtaagatacgtaaaccaaattcacttgattaacatttataaaaccccacacccaccaccaacagaatacacagccttttgaagtgcacacagaacatttatcaaaattgaccatatttggggtcataaaacaaatctcaatatattttaaaagattagtcacataatggaattaaataagaaataaataacagaaagataaactagggatgttagccagaataatgcttccttcaagtatgtccacatcctaattcctagacctaacaagaggtcacctcacatgactgaagggactttacagatgtaactaaagttagagactccgtgatgggaagattaccctggattatctgggtgtgcccaatctaatcatatgagtctttaaaaaggaagaggaaggcacaagcatgagttgcagagaagaaacaaaaggagaaaaagaaaagatacaaagtgtaagagggcgtcaactcaccatttctggctttgtagatggaggaaggaggtcatgaggccaacgaatgtgggtgacctctagaaactaaaaatggctctcattttacagccattgagaaaacagggacttcagccatacaaccacgatgaacagaattctgccaacaactcaactcggcaggaaacggagtctcccctaaagcctccaaaaaggaatgcaagctgctgacacctgagttttagctcagtgagatccatactctacttctgacctatagaacgataagataataaatttgtgtagttttcagccactaaacctacggtaattcgttacagcagtaatagaaaacaaatacactgggaactcttgaaatatttggaaagcaaataacacacttctaagtagcctatgaacaaaaaacaaatcaatggaaaaattagaaagtatttaaactgaatgataatgagaacaaaacatcaaaatcttggggttcctgctaaagcagtatttagaaggaaacgtatagacagaattaaatgtagattagaaaagaataaaggtcttaaacaatgagcacagcttccaccttgagaaactagaaaaagaagagcaaattaactcaaagtagaccccaaaaaaagaaagaaagaaagaaatagtgaagattactattcacaatagcaaagatgtgaaatcaacctaaatggccatcaacagtagactggataaagaaaatgaggtacatacacaccagggaataccatgcagccataaaaaagaatgagatcatgtactttgcaacaatatggatggaactggaggccatcatccttagcaaactaataaagaaaaccaaatacttcatgttctcacttataagtgggagctaaataatgagaacacatggacagaaagagggaaacaataggggcctacttcagggtggagggtgggaggagggagaggttcagaaaaaaaactattggatactatgcttagtacctgggtgatgaaataatctgtacaccaaatccccatgtcacaagtttacctatataacaaacctggacatgatcccctgaacctaaaataaaagttaaaatatttttttaaataaaactaaaccacatataaatgaaaaataatttaaacaattataaacaaagtttaaacaaaaataaacaatatgagaataaccatgaaaaataaaataaagatcagagctgacatcaataaaataggaaacagaaaaacaacagaaaaagcaatgaaacatttcagaaataaataatctgtaagtaaaaacaaaaatcaatgtgaccaaacaatggtccagagaccaataaaactgataaatttctagccagattgatcaggaaaaaaatagagaagatataaattatcaatattaggaatgagaaataacatcacaggtcctacaggtattaaaagaataagaagtcaggcactgtggctcacgcctgtaatcccagcactttaggaggctgaggcaggcagatctcctgaggtcaggagtttgagaccagcctggccaacaaggcaaaaccccatctactaaaatacaaaaattagccctacctggtggctcatgcctgtgatcccagctactgaggaggctgaggcaggggaataacttgaacccgggaggcggaggttgcggtgagctaagatcacgccattgcactccagcccaggcaacatagtgagactcagtctcaaaaaaaaaaaaacaataagaaaggaatgttattgtcttagtccattcaccttgctataacaaaaatacagaatgggtggcttgaacaacatttatttctcagttctggaggctgggaaatccaagatttcccagatttagtatctggtaaagacccacttcctggttcatatcttcttaccatatcctcacatggtagaaggggcaagggggctctctgggtcctcttttgtgagggcactaatgccattcatgagggctccaccctcatgacctaatcacctcccaaagcctccaccttcttttttttttttttttcagtttttttgtttgtttgtttgttttattttttatttttttattttatttatttatttatttttttaatttatttttttattgataattcttgggtgtttctcacagagggggatttggcagggtcatgggacaatagtggagggaaggtcagcagataaacaagtgaacaaaggtctctggttttcctaggcagaggaccctgcggccttccgcagtgtttgtgtccctgattacttgagattagggattggtgatgactcttaacgagcatgctgccttcaagcatctgtttaacaaagcacatcttgcaccgcccttaatccatttaaccctgagtggacacagcacatgtttcagagagcacagggttgggggtaaggtcacagatcaacaggatcccaaggcagaagaatttttcttagtgcagaacaaaatgaaaagtctcccatgtctacttctttctacacagacacggcaaccatccgatttctcaatcttttccccacctttcccgcccttctattccacaaagccgccattgtcatcctggcccgttctcaatgagctgttgggtacacctcccagacggggtggtggccgggcagaggggctcctcacttcccagtaggggcggccgggcagaggcgcccctcacctcccggacggggcggctggccgggcggggggctgaccccccacctccctccccgacggggcggctggccgggtggggggctgacccccccacctccctcccggacagggcggctggccgggcggggggctgacccccccacctccctcccggacggggcggctggccgggcagaggggctcctcacttcccagtaggggcggccgggcagaggcgcccctcacctcccggacggggcggctggccgggcggagggctgacccccccacctccctcccggacggggcggctggccgggcggggggctgacccccccacctccctcccggacagggcggctggccgggcagaggggctcctcacttcccagtaggggcggccgggcagaggcttccctcacctcccagacggggcggctggccaggaggggggctgacccccccacctccctcccagatggggcggctggccgggcggggggctgacccccccacctccctcccggatggggcagctggccaggcggggggctgacccccccacctccctcccggacagggcggctggccgggcagaggggctcctcacttcccagtaagggcggccgggcagaggcgcccctcacctcccggacggggcggctggccgggcggagggctgacccccccacctccctcccggacggggcggctggccgggcgggggctgacccccccacctccctcccggacagggcggctggccgggcagaggggctcctcacttcccagtaggggcggccgggcagaggcgcccctcacctcccggacggggcggctggccgggcgggggctgacccccccacctccctcccggacggcgcggctggccgggcggggggctgaccctcccacctccctcccggacggggcggctggccgggcggggggctgaccccccacctccctcccggatggggcggctggccgggtggggggctgaccccccccacctccctcccggacggggtggctgctgggcggagacgctcctcacttcccagctggggtggctgccgggcggagaggctcctcacttctcagacggggcagctgccaggcggaggggctcctcacttctcagacggggtggttgccaggcagagggtctcctcacttctcagatggggcggccgggcagagacgctcctcacctcccagacggggtcgtggccgggcagaggtgctccccacatctcagacgatgggcggccgggcagagacgctcctcacttcctagatgtgatggcggctgggaagaggcgctcctcacttcctagatgggatggcggccgggcagagatgctcctcactttccagactgggcagccaggcagaggggctcctcacatcccagacgatgggcggccaggcagagacactcctcacttcccagacggggtggcggccgggcagaggctgcaatctcggcactttgggaggccaaggcagacggctgggaggtggaggttgtagcgagccgagatcacgccactgcactccagcctgggcaccattgagcactgagtgaacgagactccgtctgcaatcccggcacctcaggaggccgaggctggcggatcacttgtggttaggggctggagactggcctggccaacacagcgaaaccccgtctccaccaaaaaaatacgaaaaccagtcaggcgtggcggcgcacgcctgcaattgcaggcactccgcaggctgaggcaggagaatcaggcagggaggttgcagtgagccgagatggcagcagtacagtccagcttcggctccgcatgagagggagaccgtggaaagagagggagaccgtggggagagggagagggagagggagagggggaggggtgtttgtttgtttttaagacaaggtcttgctctgttgcctgtgttgaagtgcagtgacttgatcatagctcactgcagcttctaactcctgggcgcaagtctttttttttttttttttttgagactctctctgtcacccaggctggagtgcagtggtacgatctcggctcactacaatccctgcctcctgagttcaagagattctcctgtctcagcatcctgaatagctgggattacaagtgcacaccaccacactcagctaatttttgtatttttagtagagatggggtttcaccctgttgcccaggatagtctcaaattcctgacctcaagtgatctgcccacctcggcctcccaaagtgctggggttacaggcgtgagccaccacaccccaccttctcccaaagtccccaccttctaataccatcacattcaaggttaggaattcaacacaggaatttcgggggaacacaaacattcagcccataacagttatgaacaatcgtgccaataaatttcacaactcgggtaaaatggacacagtccttgaaaaagcccactgatgatgaaatagatagcccaaatagccctttatctattaaataaattgaatttgtagtttaaaaaaaaattcagacctaggtagcatcactggtgaaatctaccagacatttaaagaagaaataataccaattctacacaaacacttcaagaaaattgaagaaggaattcttccaacttgttctgtggagaccagatttaccctgtgttgattaccctggttaattttatgtgccaacttagctaggcccagatatttggcctaatacatcagtatgttgttgtgaaagtatttttatagatgagattaacatttaaattagtagactttaagtaaggtagattattctccataacgtgagtggacctcatccaatcacttgaaagctttaagagaaaacagactgaggtcctgtgaggaagaggaaaatctgtctctagattgtctatggacagttgcaacagcaactcccttggtctccaacctgccaaaataccctgcagattttagacatgtcagctacatgagccaacttctctagagaaacagaaccaatagggtacatacacagttgtcccatccctcggtgggggattagttccaagacctccccatggctaccaaaagccatggatgctcaagtcccttatataaaatgatgtaatatttgcatgtaacctgcacacatcctcctatatactttaaaccatctctagattacttgtaatacctaatacaacataaatgccatataaatagttattgtactatattgtttaggggataatgacaagaaaaattctgtatctgttcagtacaagtgcagtcatccttttttttttccaaatatttttgatcttcagttggttaaatccacaaatgcagaacccatggattcagagaaacagacaaactgaaccaatgggagatatatatatatatatatgtgtgtgtgtgtgtgtatatatatatatatatatataaaattaaagtagacaaagaaataataaagattactattcacaatagcaaagtgggatacacgcacacaaacacacacacacacatacacacacacacacacacacacacacacacacatatatatatcacattggttctctctctctggagaaccctaatatactgataccaaaaacaaagacattacaagaaaagaaaactatagacaaatcctctcatgacttagaggcaaaaattcttaacaaaattttaataaatttaatctaataacatatcaaaagaataataccaaatgactagagtttttttcaggaatgaaaggttggtttaacatatcgtgccatcaatgtaatgtaccatattaacagactaaaaaagtaaaaccatattatcatctcaatggatgcagggtaagcacttgacgagacccaacatctatttttgataaaaattctcagcaaactagaaagaaaagaactagctcaatctgttaaaggacatctaagaaaaacccacagctaatgtacttaaagatgaaagacaatgctttcctcctaagatcatgaacaagacaaggatgtcctctctccacttctattcaacattgtactggaggttctagccagtgcaataagccaagaaacagaaacaaaaagcacccagataggaaagaaaacaaactgtttttgttcacagacaacatgattgtctatgtagaatactcaacggtcttacaaaaagttactagaattaataagtgagtgtagcagttttgctttttgttttgattaatattcaaaaattaattgtatttttatatactagtaataaacaattggaaatttaaaaaattttaataccatatatagcctggtacagtggctcacacctatagtcccagcactttgggaggtcaaggtgggaggatcgcttcagtacaggagtccaagaccagcctaggcaacatagtgagatcccgtgtctacacaaaaataaaaatattcaggcatagtggcacatgtctgtagtgccagagctacttgagaagctgaggtgggaggatcacttaagcccagaagttcgaggctgcagtgagctataatcatgccactgtacttcagcctgagtgacacagcaagaccttgcctctaaaaaaccaaaaaaaaaaaacaaagcacatacaatagcatcaaaaatataaaatatttcggaataaatctggtaaaatatatgttcatgtatgaaaagactcaatagtgttaagatgttaattctccccaaattgatctataaatgcaatacaatcttgatcaaaatcccagcaggcatttttgtagtaactgaggagccaattcaaatggaagtgcaaaggacttagagtagctaaaacaacttcctttaaaagttttgggccaggcatggtggctcacgcctgtaatcccagcagtttgggaggccaaggctggcagatcacctgaagtcaggggtttaagaccagcatggccaatgtggtggaaccctgtctctactaaaaatacaaaaattagccaggtatggtggtgggcacctgtaatcccagctactcaggatgctgaggcaggagaatcacttgaacctgggaggcagagtttgcagtgatcccagatcaggccactgcacttcagcctgggcaacagagtgagactccatcaaaaaaaaaaaaagtttcacctggccaggggtgatggttcatgactgtaatcccagcattttaggaggctgaggaggaaggatcacttcagacttaggtagcaacactggtgaaatctatcaaacccaggaactcaagaccagtctgggtaacaaagcaagactctgtttctaccaaaaaatttttaaaaatttgccaggtgtggagatcactactccatccttgaactcctgggctcaaacaatcctctggcctcagcctcccgagtagctaggactacaggtgcacaccagcacacctagctagcatgagtgttttttgtttttgttttgttttgttgtttttttgtttgtttttttatcatgtgacataagatttattgacttcatatcagcatttaagtattgttaacttttttttaattttattattattatactttaagttttagggtacatgtttgttttgttttttgagacagggtctcactctgtcgcccaggctggagtgcagtggtgaaatcatggcccactgtagccttgacctccccaggctcaggtgatcctcccacctcaaactcccaagtatctgggactacaggtgcgcatcaccacaccagctaatttttttgtgtatttttgtaaagatggagtttctccaatattgcccaggctggtctcgaactcctgagctcaagtgatccacccacctcagcctcctaaagtactgggattacaggcataagccactgcacctggccaggcaccagtgtttttaaaggtcccagaagattccaatgtgcagccaatgttgagaactggggaatgagggatgtaaatgaatccgaggaatacaaggtattatgaatgtgtggaacgcgagaaggatccaaagttttggttagatacaagccatggaagggatgcccaaggtagagaatccagtgggaaagcaggatcttgggttaggacgactgcaggagtagggataaaaaggatagggataactcagaactatgaatgaaacatgtgaattagacatttgttctgtctctcatgaaattagggtctgaatgtatcttgagaagatggtgggcagaatcatccaattttctggctatgtggttactaattcttttctcctttgggaacccaggtctatgaaattctcagtcattaaactttccagaggctctttaaattatttgtgtaatcagagaacaaaagaaggaatcccctgctctgggatccaggaacaggcataaaagacataagagagaaagtggcctctattctccctctaaacaagagactctgaatttgggctgtttcagaatcaactggaaacaccctgcctagagtgcgtctctagcacttttattttattttattttattttattttattttattttgagaccaagtctcgctctgtcaccaggctggagtgcggtggcgcaatcttgactcactgcaacctccgcctcccgggttcaagcaattctcctgcctcagcctcccgagtagctgggattacaggcgtgcaccaccatgcccagctaatttttgtatttttagtagaaacggggtttcaccatgttggccaggatgatctcaatctcctgatcttgtgatctgcccgcctaaacctcccaaagtgctgggattacaggtgtgagccaccatgcctggctgcatttatatttttaataaatccctcaggcctccaaagtttcagaaccatagctattttttttttaagatagggtctcactctgtagcccaggctggagtgcagtggcacaatcataactcactgcagcctccaattcccagcctcatgcaatcctcccacctcagcctcccaaatagctaggactacaggtgcccaccactgcactgagctgattttgtttttttttttggtcgagacgggatgttgctatgttgcccaggctggttttgaactcctaggctcaagtgatcctcttgcctctgcctcctaaagtgctgggattacatgcatgagccattgtgcccagcctagaaccactaccattagaagtaatagaagatgacatctattgaaaatatccctgtctcagccaggtgcagtggctcatgcctctaatcccagcacttttggaggctgagtgagtggatcatttgaggtcaagagttcgagaccagcctggccaacatgatgaaaccctgtctctactaaaaatacaaaaattagctgaacttggtgacacatgcttgcaatcccagctactcaggaggctgaggcaggagaatcacttgactccaggagacagaggttgcagtaagccaagatcatgccacagcactccagcctgagcaacagagcaagactccatctcaaaaaaaaaaaaaatccctgtctcaaactcctgctttccaggtagatggagcgggataatgtgctttaattggtgaagggtttctgatccccatttatcatgcagaaggcaggagcaagccagagacaggtcctggcgaaaggaagctaaaatggtgcctttgatacaggggaaagggatacgaaaggggcttaggtgagacctccttacagctagtggcacctggtcagcagggccgtagagttgaggccatccccttagcagcagtgggactttgttacacacaccctctgagtcttggtgagaaactagtcccagggccccttgttgtctctgccactcccattcatgacatcatggaaacttctgtgcggctgggctcctgaacacagcagcctgccctcggctggatgaggcagccaaaaccctaaaagggttgtgatagggactggagtcaacaagtagctgtgggaacgtggtggcgcagacccttcacccagggagccctgtgggctagaaacaccagacagccaggatgtggcgagagactgcccaacacactgtctgtgtgaggcagaggaaggaaggagatgaaggaagaaacaggtaggtaggagggcgagatcccaagcaagtcaggacaactcccacgccttgcccaggagccttaagaagcccaggcacctgctgagtgaaagaggatatatttattggctgagcaagaagggaaggtacagttggtaatggctgcttctagaagccaccagtctcaggttcacttgttccgagcccagtttcctccaaggtggctgtactgagcatcatctcgatctcggaggggctaagagaggagaagagaaaacggtcaggaggcagggttagaactcttcaaggaagggccccagcaggccctgacgatgagagctcctgcctgacctctccagtcacacccagcaatgaactccccagtaggacccttcccacgtgcaaacagcattcagtgtgagcctctctatccccacttaccctcccttcattcctgcctccttcccctcaacgctcacctgatagacctggtcattcctcaacagagcttgtgtgtcggcagctagaagaaccagagagagacatcaatggcctagcagatgggactgtgagatccaccctcccacaccctcagaagtctgcatgagtgatatgaacacacaagttctttcaacagtcaaagttctaggagtctttaggagattgcaagagtaactcccagctgagactaaacctaccaccagccccattccttagctggtgcataagctcactggtacacacacacacacacacacacacacacacacaaacacactctcatgctctgctcttccactaacccccagacagccttccagtctcatgtccagcaaagcagaagactcccaaagcaaggagcagagtggcaatgacatcagtgacaatgatgccagccacggtggctggatccagctccacacagctctggcacactgtgggggaagggaggagagaggagaggttgagagcctttaagatcagggaaccatcctctgcctcctagggcaacccttagatctcttatgccaaaacccaaacttcaataagaccctgggagaaaggcctggtgatgggcttgccacaccttcctccaccctgcatcctaaggaatccctgggaagagccaagaagtaatctcagcttttgggaccttgaacaaggtggtgggccaaacctctcacccaaccaaggctgcagtaacatgacccctactgctctgtcttgctgagttaagctctctcttccactttgaaggtccccaaatctggcttgtaccattacaatagtgacctcactttgtttagagaacagatgggttcaccatatccctctctagccagaaagttctcacatccagaagccctatccattccaacccaaagggttcaggaagcacgtacttcgataatgaacttgcacggtagattctttgtccttgtatatatctgtcccattacacctatatattcctcgtgggtccaggatgcgttttcccaggtccagtcttgtaatgtctgagagcagtgttcccaccgttccctctacccatgtgatgctggtattgcaattcacaaacactctgtcctcaagttcctctataggtatcttgaaggggctcactaaaggggaaaaaatatcacagttggagacagctctttgatctgcaccaagccctttgttctgcggaagctcatacttaacagagaccattttcctggtccaggacagtttatggcttccatcaagagagacagaagtcacaagaaaaagccttcagaaagttccccaccaactgcaggggtcaagggggacatgaggatgccattcaagcagaggacaggtcttggggccttggtgcaaaagaggacccctcagagcaggattgacccaagcaccttcctggaaatgaatccagaccactgatgaggagtagggggagcacggaccactgaagcacctggaagatgtggaaagacagaagaacattcctcgattggaaatgtctgcattttttcttcaaggaaacatctaattccacttcccagccatctacaacactcccacttcagcttcttatcctcatccttcctcattgcccctgctccattgacaaccaagaaagcggggctctcaacactgaagcctttcccagggccagggatggctgtgggtggagaccagctggtttaccagcccctgaattatcagccaagtggtccagaacgggaccagggcaaatcccatgtacagttttccacccttggttagaaggaggagaacaggaaaaaaattttattgaatccatccctagagctcctcacaagtcaagtcttgtgggagacttttagggctggaggtgagtgcagcaacattccagatgcagtgagttcctctgacagcctgagcacatctccacaggccacagaggcactacagtctatgcctccaaacacagggaaaagtggaggctacattcattcatcctgggcttcacactaagtcccaaatttggatacaagagcatcttctagaaaaccctgaaacagctgttgctcacacttctgaagcaggttggaagtatatgcatgtatcctcagggagacacatgcacatcaaatgcttcacgtcctacagtcgcgtcctcttcagggatctgtctccagtggaaatcctgagtgccctagtgcagccaactattaggtgaccattggacccagtttgcttagtgttgaaggggttcctcggacatgggactttccattttaaaactgaaattggcaaactgagatgagttaaaatcctaccatgtaacaacccctcaaatcttccctccgtcctgctcaacctaaagttaacttctcttaaagcattcacataagtgctaggacatgcctccagggatgacataatcatggccaaacaaacaagagtcctgattccagaggccatcaggcctaaaaggagtagtgcaggaagctgtgctcccatggccagtcccagattcaggtacatacgtactgagctattttctgcagatctctggcctaaggccttctgagagacattctaggcccacatgcacccatggctggagtcagtcaaagccaagagcctgtttcccagactctatgctacatcctgcccctgccctcctgacacccctggggtgcctggtgaactgaagctagcaccgagaagcacttttttttttttttgagataaggtctcacaggttgcctaggttggagggcagtggcatgatcacagctcactgaagccttgaaatcccgggctcaagtgaccctcctgcctcagcctctcaaatagctgggactacagttgtgcaccaccatgcctggctaattcttttgttttttgtaaagatagagtctcatcatgttgctcagactggtctcaaactcctggcctcaaaggatcctcccacttcggcctcccaaagctctgggattactggtgtgagccaccgtgcctggcaagaaacactttcaagtgggcctcactcccatcagtaatgtccctctcaggtcccttcccccacccacctggagtagccttaccttgcgagagaagggtagccagtaccaggccagagagaaacgtgctatgttccatctcccagcggaactcatccagtagataaagccaggtcaccgaactatcagcctgggtgagagctgccctcccctagctgactcacaggtaccggaaagaggagagtgggggaggaactagaagatgtctgcttctctgctttctgccgttgatggtgggaaattttcagagtgggggtgggctaggggtagggtaggaaggaagcggtgtaaattgctctatctctgagcagggagctggcagagaatatggaaaaggtggcctgaactttagcgtccctattgacaatgcaaccacatttacacacaacctaaacactgccacatctcgaagccccttgagagaagccgtcggccccatagcgcaagccgtagcagctagatttctcatggaggctgatctttctcaggacccttcactaggcagccagggacaccagatctagcagcttcttgtcagtgggaggttgggctttagagaccccagccagagatttgaatcctgggtccaatactgcctacctgtggggcctgggccagccataaaatttttcagagtcttattccattagtaccattattaggattcaaacaagatatttgcatggtgcctcacgcatcatatgtgctcattaaggggtagttattaataataatataattgactgacaggcaatattgagcctcccggtgagacaaatggacctttttcccctgtggcctacgaggatctgaaactcttcacgctgctgcagttagactgtcacttacctggggacagagtcatgcctgtcttgctcactgctgtatcttgtgcctggcacataacgggagctctgcacatttttgttggctcactgactgactggctgagggagataggggcctgagatcctggacattcagtccgggctctggcccctgaaaatgtgctggcctgtcctcggaattgttccacctattgccttccaggcgcctctttcatgatctcaaaagaatagtgaaaccaggtgccgtgtctcacgcctgtaatcccaacactttgggaggctgaggcaggtggatcacaaggtcaggagttcgagaccagcctgaccaacaaggtgaaaccccgtctctactaaaaatacaaaaattagccgggcttgctggcacgcacctgtaatctcagctactcaggaggctgaggcaggagaatcgcttgaaccccggaggtggaggttgcagtgagctgagatagcgccactgcactccagcctgggcaacaaagtgagactctgtctcaaaaaagaaaaagaaaaaaaaagtgaaaaaaattcctgaatgaaggcctggactgaggtggctttccatttggaggtccagccccaagcatctgagagtccctcctaaattcattacctacagcaacaacaactagcaacaagtaacaactggctacgatcctaacaactaatgacagggacatttatctccctcatgaagaaacggtcccaggaccatctcccacccagcatccattgcggttccctgtgcaagatgagtctctgagtgggaatccagcactctctccctcttcttccccaccaccttcaccctccttaacggaaaaacaaaaggcatctgcacctgcagccctgctgaggcccctgctgctcacacttgcagcagagggtggaggctctgggttcttgccttctctcaaaggccccagccccaacagtgatgggtggagccagtctagctgctgcacaggctggctggctggctggctgctaagggctgctccacgcttttgccggaggacagagactgacatggaacaggggaagggcctggctgtcctcatcctggctatcattcttcttcaaggtaagggcctactaggggtctggaagcctggggaagggctcaagggaagagcccatcactagtgagacaggaatattggtatccctaaccttcagcctacctctgctgtcaccttagagttcaaagaagggcaaaatggaggctcttaactgttctctgctagagagaaacagtgtcccatggaggagaaggaatccttgtctctgaaaaatgcaaacagagtacttaaatggctgaagagaggaccctgttaccgccatcttagatttgaatgcagcccaaaagggcataggccaagaaactaaaaggaaaaagtatatgttccctacttcagagctgggggctagcagtcgacctaggaaatgtccattcactcagttgggcagttggccaattggtcaacaaagatgggtgagaccctaatatgtgatatgccatgaggaaataaaaatgaataaaacacttatgctctacagaactcatagtctcattggagagattagttttcatggtgccagactgagtgtacagtatagtatgggtgcctgcatgaatactccattggactatccaataggaagtggatgaactgggttgatgcctggagtctggacatcctgggaaagttaaaaccatggaatttgctgaagtcacacaagtactatgtgaggaagagggagctgaagatggaacagtgagggcaccaattttaaggggcagttagagaaaaaaaaacattccaggaaagagataaaaggagaatcaaagagctgaaataatcaaatgtatgcactaccttggaaaccaagagagtagagagcttctagaagaagagaattaccaagagtataaaatgttaaagagagcccactaatataagaatatatttaaaagtttaagtctgcgggatgtggcagaatatgcatcatgggtgatttagcacagtttcagcagggtattgtgagtggaagccaagtgaaaattggtagaaggtgaaggtcaggtgatgaggtcagcaagtgtagactattctttaaagacatttggatgaggagggagaaaagactgggtggtaggtagaggaggaagtagagtctaagaataaatgtttttgagggtgagagaaacttgagcacatttctaggctaaaggagaagatgatgagtagagcaaggtcctggagttgatggtggaaggacagagtcaagagtggggtcaagagcacagagaggaaggcaacgttaccctctaagaccaggagaaaggaagtgcaaacggcactggccacaaataggtttataaagggaaaggaagctaaaggagaaaggacaataacaacttccgtgttctaaaaaatccaggtgggaggcaatgccacctgctgaaactgagctgggtgatgaccggttgggagacttgaagaggacagtgagagtttagaatagaattatttctgagagaaatgcaaggaaaagtcaggtaaagacaacacaggttgaggagcaactctcaagcctgggtgaggtggctgcatatcatggaaagagcatttgagttcagcagtagaaaacctgagctctggatccagcttggacaccaatgagctatgtgtacttgaacaactcctccactgtctgggagttctcatgccagccaatccagaaatgtggcagggacgggcatggtggctcatgcctgtaatcccagcactttgggaggtcgaggcaggtggatcacctgaggtcaggagttcgagaccatcctggtcaacatggtgaaactctatctctactaaaaatattttaaaaattagtggggtgtggtggtgggtgcctgtaatcccagctactcaggaggctgaggcaggagaattgcttgaacccaggagatggaggttgcagtgagccaacacggtgccactgcactccagcctgggcgacagagtgagactccgtctcaaaaaacaaaacaaaaaaaaaagaaatgtggctatatgaactcttaagtcctaaaaggaaacctcactcagatatgcaacattaaaagatgtcaatcagccaggcacagtggctcatggctataatcccaacactttgggaggctagggagggaggatcatttgagcccaggagttcaagaccaacctgggcaaaatagggataccctgtgtctacaaaaactacgaaaattagccaggcatgttggcatgcacttatgccagctacttgggaggctgaagtgggaggattgcttgagcccaggagcttgaggctgcagtgagccatgatcacaccactgcacttcagcctgagtgacagagcaagaaaaaaaaaaaaagatgtctcaaaaaaaaaaaaaaaaactatgtcaatgatcagtgcaatctccttccctgaatccaatttagaatgaggggtctctgtcttctctcggtcttctgaccaggtggtcaggagaaaaactagttagaaacctctttaactgtttgtcttgccttttctcccatttgctcatttattcatttgcacattcattcaacaaataaagttcctaccatgttccagacactgcactggatactgttcaaaaataatcccgccctgcatgaggttctaagacagttcacttcttgtatttccattatactttgactcatgaccgcctctccctatcacacacactccacctctagccacactacctctcttgtccttttccaaagctgcatcttattcagctattctttctactcagaatgactttctctatctggtatattcttgcttactcttcaaggcccagacaaatgtcgtttcctctattaagctttccctgatcctcacccttggacaaaattaatagcttctacccttttttcatatgcagtcatataagcactaaaagataatgtatacattctattaaattaattgcatatatgttttaattttttcacttcattcataaactttggaagcagcagttgattcttcatatcagcactcttttctttcataatatctaattattttaggtcataatagtcctcgttaaatgtttggattaaatctaattgaattgaattcaagtgccagatctctgtaatatgtctaccatgcaactctactaccctaaggttttgtttgtctgtttgtttgtttttatttttttgagacagctttaacacctaggctggagtgcagtggtgcaatcttggctcactgcaacctccacctcccaggctcaaccattcctcccacctcctgagtagctgggactacaggtgcataccaccatgcccggctaatttttttgtattgtctgtagagacagggtttcgccatgttgtccaggctggtgtctaactcctgggctcaggcaatctgcccacctcagcatcccaaagtgctgggattacaggtgtgagccactgctgccagtcaactctgagttatgagacagatttgaggactaattgaaaagctaacttccctgggacatccagggtttttataataaaaggatcaccaaggctgaatattttataaggaactcagcctaaaggttttggatagtgcacacccactccttgccagggcattagctgctcaagaagcagagtgttctggactggataggcaatatccttacttacatatactacaatacaattctgatgctaaccccccaaattagtgtcagaccctacaggttaagagcatggttcccaaccagattgccctcactttaaatgccagctacaagttcagggtaccccagaccactcacatttctgacaaactgcctgcaatcttaaggattcccatgaccctcctcattgataatttgctagaataactcacagaatttaagaaagtgctgtacttcctatttcagttttattaaaaaataaaataaaatcagaaccagctaaatgaaaagggcaaggtctaggagggtcccgaacacagagcctccgtgccctctccccgtggaattagaacacatcgcccccagcactctcccacactctgccagcacattgatgggttcaccaaccaggaagctccaccaagtttttattgaggtatctttacataggcatgattgattgaatcattggccgcttgactgatctcaatctctaggatcccttcctggggctgataccactagtttcaaagctgcaatcctcttaccatatggttggtcttgaccagcaccatcctgagtcattgccatgcataaactcaggtatggtctaaggatccaccacagataacaaagccactcctgtcactcatgaaattccaacggttagaaacaccctcccaggataccaggacaaagatgagacaaattgtttattatcaccttgaattcaattgagtgatttagtctacaatccggaaaactaagtatagatactaccattttcatggatttggatctttcttcatcttggcctcaaataaccatggaaatacttcagggcatctgaacaactccatgcccagctaatactctatctctcttctgtctttacaggtactttggcccagtcaatcaaaggtaggagaaatggcttctttctatactcagactcagaatattgacggaaatttggcttcctacaacagtagtcctacaggagcgaacagtttagaatgaatgaaatgacggggatagagaggtgatgtctctattgtcaaccaaatcagtgacctgacataacctgttccgggcagcttgcctgtagctaagcatttaactggtctcttacaggagaagcaggaccctagtagctagggacacatctcaaactgtgacccatgaaccagtaggtattggcgtcacctgggatcctgacgttagtctctgtcaatccttctctttagttcatctattctacccaaagtgatctcatcatctggtatgctgttagcagtttcttacctgtatagtatcttccaaataacatgccccaaaatcccaaagttttacccctactaattacagcaatgtctcttttattcttcaccccctgacgcagatattggcgtcacccgagagcatgttagtaatgcagaatctcccctccccagaactactaaatagcacctgaaattttaacaagatccccatgtgattcatgtgcacatcaaagtttgagaaacactactctaatgatctcctggtatgcagaagcagggagaatttcagaggcaagatccttaatagaaccacggcttttctcatttcaggaaaccacttggttaaggtgtatgactatcaagaagatggttcggtacttctgacttgtgatgcagaagccaaaaatatcacatggtttaaagatgggaagatgatcggcttcctaactgaagataaaaaaaaatggaatctgggaagtaatgccaaggaccctcgagggatgtatcagtgtaaaggatcacagaacaagtcaaaaccactccaagtgtattacagaagtatgtaatcccctttggtctgtttgttgtgaaattaatcagtatttgctgttctggtgagctttttatctggggtgaaagtggaaatagatcctcaacagtaatattatcgcctgttctcttaatttcagcttgcctcttttaaaatactgtaagatacttccctcaccctattgaaaaactacagccagtcctgtaaaattttgtttacctttgggtgggctccatggattcaagcaattcagcactgagttgaatgaaggggttggggagacagaggtgatcataaggtgagcagcagtgagaactggagcgcagtggagcatgaagagtatctagtcttccttctgttccagatacttcctggtagttagactacatgggcttccccaggaatcctgggggacttaagagcatcaagatgcattgagttttggcgcaaggatcttcccttgccctgccacccacagaggaaaagcctgctgccctccacagcggcattattgcagacaggcaggagaaaacgaaccaggaaaaacaactttcgcaacctgaaggtttgtctctccttttccctacagtgtgtcagaactgcattgaactaaatgcagccaccatatctggctttctctttgctgaaatcgtcagcattttcgtccttgctgttggggtctacttcattgctggacaggatggagttcgccagtcgagaggtaaaagaatgctcttagatgagagatgggaccacctgagaccctcagctttcctcctaccattatgtacccaatggaagagactgagttggtgcttcttgctagtgtgcatagttgggtgaggctgtatttctctgagacaggagaaaggatacttggtgttatcacagcatgttcacctgtctcaagatacagctccctctgtgaaaaaaaaaaaaaacaaaaacaggcgcagtggctcacgcctgtaatcacaacactttgggaggccgaggcgggcagatcacgaggtcaggagatcgagaccatcctggctagcacggtgaaaccccgtctttactaaaaatacaaaaaattagccgggcgtggtggcgggtgcctgtagtcccagctactctggaggctgaggcaggagaatggcatgaacccgggaggcggagcttgcgtgagccgagatcgtgccactgcactccagcctgggcgacagagcaagactccgtctcaaaaaaaaaaaaaaaaaaaactattttaagtaaacccttacatacagaaaagtgaatcacaagcatacagctcaaaaaaaaaattcacagagcaaatacacccatgcagccagcacataatttaagaaagacaatattaccaatgccattgaagcccctcttgtggtcacttccagccactacccatcctcaagagtgagcattgtcctgacttctaacaacaaggattaactttgcttgtttttgtcctttatgtaaatggactcatatactaagtattcttgtgagtagcttctttcactcaacaacatgtttatgtgctttatccatactcttgtgtatatataaaactcttattgttatttagtattccattttgtgaatataacccaatttattatgcattctaccttgtgtggattctgtttcttttttgtgcagcttcagacaagcagactctgttgcccaatgaccagctctaccaggtaaggggatgaagaataaaagagacattgctgtaattagtgggggtaaatctttgggattgaggggcatgttatttggaagatcctatacaggtaagaaactgctaacagcataccagatgatgagatcagtttgggtagaataaatgaactaaagagaaggattgacagagactgaggtcaggatctagtgagcacaagttgaagaacacactgagagggacacacgaagaaactctcgacaggctgggcactcactatagacaggccatggctcatgcctgtaatcccagcactttgggaagccaaaacaggtgaatcacctgaggtcaggaattcgagacaagcctggccaacatgatgaaactctgtctctactaaaaatacaaaaaaaattaaccaggcgtggaggcgcgcgcctgtagtcccagctactcaggaggctgaggcaggaggaccacttgaacccaggaggtcgaggttgcagtgagctgcgattgtgccactgcactccagcctgggcaacagagaaagactccgtctcaaaaaaaaaaaagagagagagagaaaaagaaaaaagacagagcctccatctccttgtcctctttccatcctcaggaccatgaagtacccactccaaattctcacatataaaaaacattcaataaacatgcatcaaattaattaatagaggatggaaaaaatgacttatgactgtgctgtcctttccagcccctcaaggatcgagaagatgaccagtacagccaccttcaaggaaaccagttgaggaggaattgaactcaggactcagagtaggtgggttcttcaatgccaattctaataaaggacccttgcatcaactgccctcgcaattgcttctaagtctagctcccttccctaagcggctataagcatcagactctggggatcagggattgggacgtggtttggggtactcttttctaaaaattctggggccatactgattgtcttggcctaggtaaatatgaattttatgtatctgtaaatcctgtcagagcagggcctcaagccatagagatgctgaatattaatcttaacctacatttgaatttctcattatctacactattaacattttgggctaattaattatttgtgatgaggggctagcctgtgcattgtaggagttatggaagcatccctggcctctctccaccagatgctggtagattgtccagtgtgacaatcaaaaatgtgtccagacattaccaaatgtgtccaaacatcacctccagggcaaaatcacccttagttaagaaccactaacccatattaaccttccaatcaataaatcaatcagtcagaagttatgatttaattaatctatctgaagtttctatcaggaagacagggttgaaagcattatttgttttttttgaacaaattgcaatttttcttttttcagtccaggtgttctcctcctattcagttcccagaatcaaagcaatgcattttggaaagctcctagcagagagactttcagccctaaatctagactcaaggttcccagagatgacaaatggagaagaaaggccatcagagcaaatttgggggtttctcaaataaaataaaaataaaaacaaatactgtgtttcagaagcgccacctattggggaaaattgtaaaagaaaaatgaaaagatcaaataaccccctggatttgaatataattttttgtgttgtaatttttatttcgtttttgtataggttataattcacatggctcaaatattcagtgaaagctctccctccaccgccatcccctgctacccagtgaccctgttgccctcttcagagacaaattagtttctcttttttttttttttttttttttttttgagacagtctggctctgtcacccaggctgaaatgcagtggcaccatctcggctcactgcaacctctgcctcctgggttcaagcgattctcctgcctcagcctcccgggcagctgggattacaggcacacactaccacacctggctaatttttgtatttttagtagagacagggttttgctctgttggccaagctggtctcgaactcctgacctcaagtgatccgcccgcctcagcctcccaaagtgctgggattacaggtgtgagccaccatgcctggtcttaaaaccagtttcttatatatctctctggaggtattctaggcatatatgagcacattctcaagtacatattatcctcccttcccctatcttttagacaaatgatatcaaactatacatcttgtgagattattgcataccattatatgaagataccattatatcctttttaatgcaaccatattgtacaaatagactatgatttatttaacctgttatctatcagtggatatttaagttggtagttggttccaatcttttgctcttacaacaattctgcaatgactaacattgtataaatatcatttttaaaaataattgcattgaagcataatgtacatgccataaaatccacccatcttaagtgatttcacctgttctcagaaatttttagtaaatttaactaattgtacagccattaccataatccagctttaggacattttcttttttttcttttcttttcttttttttcttttttttttttttttgaagtggaatcttgctctgtggcccaggctggagtgcagtggcgcgatctcagctcactgcaacctccacctcctgggttcaagcgattctcttgccttggcctcccgagtagctgagactacaggcacatgccaccacgcccagctcattttttgtgtatttagtatttgtgtatctagtatttgtgtacttagtagagacagggtttcaccatgttggccaggctggtctccaattcctgacctcaggcgatccacccgccttgacctcccaaagtgctgggattacaggtgtgagccaccgcgccaggcccgtaactgtattttaatatagccattctatggatttaatatggtattttattatggccttaatttgcatttccctagatactaaccatgctgagtgtcctgtcttgtgtttattaaccattcatatatttttagtgaaatgtgtatcaaatcttttgcccatttttaagttgacttatttgtttgtcttcttactattgggttgcatatgtttttgatataagtcctttatcagatatatgatttggaaatattttctaccaatctgtggtttgtttttcttaatggtgtcttttgaagtgcaaaaggtttgaattttgaagtacattttattgattttttcttctatatattgtgcttttggtatcatgtctaataaatctttaccaaacccacagttacaaagattttctcctgtcttctttttatactttttacagctttatggttttagctctaacaataaatgtgattttgaacatacataagactatttgtaacaaacacaaataaattgaattgttgggcacttgtatttgcatttgtaattttattaactattgccaaatagcagttgtaaacacgtacacacacacaagtgtatatacacatatacatatatatacatatacatgtatgcatatatgcatatatacatatatgcatatatacacatatatacatatatacacatatacatatatgcatatatacacatatatacacatatacatatatgcatatatacacatatatacatatatacacatatacatatatgtatatatacacatatacgtatatgtgtatatatacacatatacgtatatgtatatatacatatatgtatatgtatatatacacatatacacatgtatatatacacatatacacatgtatatatacacatatgtatatatacacatatacacatatgtatatatacacatatacacatatatacacatatgtatatatacacatatacatatatgtatatatacacatatgtatatatacacatatacatatatgtatatatacacatatacatatatgtatatatacacatatacatatatgtatatatacacatatacacatatacacatacatatatgtgtatctacacatatacacatatacacatatacgtatacgtgtatatacgtagatacacatatacatatatacacacgtgtgtatatacgtatatacacaagtgtgtatatacgtatacacacatatatgtgtgtgtatacgcatacacacatatatgtgtgtgtatacgcatacacacatatacgtatatatgacagggtcttgctctgttgctaaggctggagtgcagtggcacaacattggctcactgcagcctcgactgcccaggctcaagcaatcctcccacctcagcctcctgagtagctgagatttcaggcgtgtgccacaatatccagctaattgcttaattttttttatagagagagggtctcactatgttgcccaggccagtctcaaactcttggggtcaagtgatcctcccatctcatcctcccaaagtgctgggattacaggtgtgagccactgtgcccagccaggttgtaccaatatacactaccaataacaacaaacaaaagtgcctgttactccatacatgttccaacagtgtattattaaacttttgaatcatgccaaactgaatggcttctcactataattttagtttacatttttcttattaaaaattggaggctaggtgtggtggctcatacctgtaatcccaacacttcgggaggccaaggcaggtggatcacctgaggccagtagtttgagaccagcccagccaacatggcaaaaccctgtctctactaaaaatacaaaaaattagctgggtgtggtggtgggtgcctgtaaacccagctactcaggaggctgaggcaggagaattgcttgaacctgggaggtggaggctgcagtgagctaagattgcaccattgcactctagcctggacaacaagagtgaaactccgtctcaaaaaaaaaaaaaaaaaaaaaaaactggagtaaaccatttgtttttccttctcatgatacataagttcacatctttggtctttttcttattgacttacactaaccccttacatatttgggaaactaggtcttttgtgatattagttgcaagtctttttccaactttatgtgttttttaactttgctttaaaaaacacattggttagtttttcacgcacactttacaattatttgcatgtagtataattcactggtctcctatggtctctaggttacgtttcatatttagaaagtctttctccattttaaaattatccttttttaaaagttcccccatgaattcctctagcatttttatggttttattttatgcatttatatctttgacccatctcgaattgattttagcatcagatctaatgtagtaaccaactttaaatacagatagttacccagctattccagaaatattattgaatgattcattttgcgtccattaattttaaatgctgttacaaccccactcgccagattataagctccaagaaggaaaacacttacgttttttcactatggtatccttaggaactagaacagtggtaggcacacaaagattgcccagggctttttgtgtgtgtgtggtaaaagatatgtaacctaaaatttaccattttaaccttttttttttttttttttgagacagagtctcactctgtcatccaggcactctagcgcagtggcacgatctcggctcactgcaacctctgcctcccaagttcaagcgattctcctgcctcagcctcccaagtagctgagattacaggcgcacatccacatgatcagctaatttttgtattcttagtagagacagggtttcaccatgttgaccaggctggtcttgaactcctgacttcaagtgatctgtccacctcggcttcccatagtgctggaattacaggcatgagccactgcacccaaccccattttaactatttttaagtgtaccattcaatggcattaaatatatccacaatgtgtagccatcatcactacccatttcagaaatttttcatcctcctaaacagaaacttggtacccattagacaataactcccattcgcctctccctccaatccctggtgacctctattatactttctctctcaaggaatgtgcctattctgtgtaccacatataaactgaatcatacactatttagtcctttctgtctggctcgtttcagttagcataacgttttcaaggttcatcaatgtttcagcgtgtatcagaacttcattctttttcaaggctgaataagtcatctgtagctatataccatattttgtttatgcattcatctgttaatgaacattctgggttatttctaccttttggttattatgaatagtgctactgtaaatatatgtatacaagtatctgagttcctgctttcagttattttgaacatctatatcaaagcggaattgcttgatcatgtggttatactatgtttaactttttgaggaatcatcaaactgtttttccaaaaagtctggactatttaacattgccatcagcaacgcatacggtttcaatttctccacatctgccaacaattactttcctttttttttatagtagccatcctagtaggtattaagtggtatctcatgattttttttttcatttccctaaagactagtggtgttgagcactctttcatatgcttatccaccatttgtacagttggccttccatatctgtgggctctgcatctgtggcttcaaccaaccatgaattggaaatattccaaaacaaatttcatctgtattgaacatgtacagactttttgtcattattccctaaacaatacaacactatttagatttatgttgtattaggtattataagtgatctagagatgacttagtcatctctaggatgacacaggaggatgtgcataggttatatgcaaatactgcatcattttatgtaaggaacttgagcatccttggattttggtacccaagggggtcctgaaacaaatcccccacagataccaagtggatagtcattctcttggaatgtatcttctttggagaaatgtctattcaagtcctttgcccttttttgaactgaactgtttgggggtttttcgttcttgtagttctttacatattctagagatgaatcctttatcagatatatgagttgcaactattttctctcaatctgtgaattttcacttgcacagcgcttttaactcttgaaaattatgctgcttctattatttatgtgtatcccgatctcttgccctcgtgacccgcccgtctcagcctcccaaagtgctgggactacaaggcgtgagccactgtgcctggccatctatgtgtatctcaaaacaaccttgtaggatgtatactgtctccactttacagataagaaaactgaaatccaatcaaagatagcacactccaaagattgctccaaagacagcacaacaataacaaacttgtagttgttattgctgttagtgttatccctttgaataatagagagtaacagaagctgcttcaaaaaggtctaggactggtgggaaaataagagagcagacccccaacagaggttgcgagcagagccagggatcacagagttttatctgccctcggtacgctgatttccaaaacccagcctcatattctatactccaaagcgcactgccaggtgggccaactccagcccccacaatccgatgccaaggccacttcttgccacttcctgcccgcctccagcccgcccctaacaagctagcgcatgcgctgtaggactatttgcgcgccgttccccccggtgagcctgcacaccgtgcttccggcgcggagatgaacttccacatgccccggcgcttgttgatgacgtaacttccggttgctgtgctgagtcggaagtgggaacccttcggccgctgagattctgtcgtgtcgtcgctgctggcacttcaggctctggtaagacaggcaatagcttcaggggacggggtcgttgactttgcgttgtgatattttctgctggtccaatgccacttcaagcctgttcactcttatcttctccaaattccttctcctatgctttgctaaccagggaccttctccttcttgaacttcgaccctgtctgatttggaaccccttacagtgccccagcttctgatgtctctttgtacatttctgtccccatctttgccaagcccctcctggaagaggccggagcgctatcattgcattatcttttgacttaactttctctagaacgtgccccgggcgggtggatctccctccttcccgcgaatcccttatggagcatggaaggataaaatataaagagtagataacaaataggcagatgccaagaagataagattaatcgtgagtcgtaagcaaaccagttcaatgcatacgtcagggtgttgataattcttaaggcaggtgatgagttcaccacagataactcttggggcactctgcttcatgtttccttgggtttagaagacacttctaaaattgagtgaccatgcctcatgaccttatatttgatgagccttccttttaggatcagttttatgccctgacagcaagcatgtgtttagtctcgctgtcatttactgttttggtctcacgtggaagcccacctgcgataaaatgggatccaagaaggactgctgtctgctttttgacttgagatccttctaggctgcagatagatgtgttgatggaatttgttgccacattagcatggcctgatagtgttaggtgaaacatacgacaacgaaaattgtttcttaatttctattttaaattgatattttaatttctattttatattgatatatgtattatttgccaggacacagaccttatgggagtatgatttgatagagcttgattttgacgatcccagttttacaaagtgttccagatatttctgttgaaaaacaataccaagtctgatgttaacacacttgtgtgttcatgagagctgacagtggtcttaaaggattagtggtactattcataaacaaaagcttgtattaggaggaagtgacagaattttgtaggacagctattatagatatagatctttgcagcaagtgtatcagagtgaaacttgttttcaaggaggatatattttaaaagaatcaaatccaaaagcttctaaggttggtagctgtaccatcccaaagtgtctgacaacaggatagtgttgtatctctgtatggcagttgaaaataggaaaaaaaatacatacatatatgtatgtatatatgtgtgtgtgtgtgtgtgtgtatttttttttttttttttttgagacagagtctggctctgtcacccaggctctgctctggagtgcagtggcacgatctcagctcacggcaacctccatctcccagtttaaaagtgattctcctgcctcagcctcccaagtagtgggattacagcctggctaaggtgtggtggtatgcgcctgtaatcgcttttagtggagacggggtttcaccacattggccaggctggtctcaaactcctgacttcaagtgatctgtctgccttggcctcccaaagtgctgggattacaggcatgacctactgcgcccggcgctgaaaataggagattataaatcccgaatgacattattgaatattaaacaaaatatttaggtttcattttatcggacctttagagtgggtgattatctgggtactcttactttggtaagtccattgaacaaatctaaactggcatctccacaaaggttctcatcaagtgatcagtcctcctttttcctgtaaaatttttctataagtgactacacagttttagcccttttttaatgaaaaaaagtttgtgcacagatttgacatacgtgtgaaaaagatgagcttagtgaaagataggtgagaacctttttgttttttacagatagtagagatgacaacagagacttatttccatccaccattctacacatgccaagataccaaagaaccagtgtctagcctggtagcttgaccttccactgcaacctaagacaagtagtaaagcccttaccttgaagtagggtcatgggtgatgctgttgattacaaggagttcagaaagaactacatgtaagattgaagccattcaataactacttatttaggattttgtgattgtgatgtataatgccagacacagaagaaagaataatcagatatgaacatgtaatcagaagagcttacagcctagcaatgtagaagatctgcttagaaatacaatgcagaaagtttaaaatcctagtaaaaatagaggtaaaatgtagaaagctagtttctttatacagtgcaacagtatagtattgagaaagaaggaagtaatgcagtttatggtgataaattctttttgtttctcttgatagtctttttgtttgtttgtttgtttgagacagtttccctctgttgcccaggctggagtgcagtggcaacgatcttgtctcactgcaacctccgcctcccaggttcaagcaattctcctgcctcagcctcctgagtagctgagattccaggtgcacgccaccatgcctggctaattttttgtgtgttttaagtagagatggggtttctccatgttggtcaggctggtcttgaactcctgacctcatgatctgcccgccttggcctctcaaagtgctgggatcataagcatgaaccactgtgcccggccttcttgatagtcttaagagcttctctgtcatatgtcctatattcctggctttcagcttcctttctgcttacgtgttgcaggtgatgcatgtcctttgtaataatctggacacttttcagttgtgttttaaaaaacatcaaactggtttaggcatttagggaaattttattggtttttataactgaaaagtccagacttatctttccatctctcaattctgttttctagtgtatgttggcttggttttaggctaggccttttctaaatggtgtaaagatggcaactctatcttactggcttatcaactcaatcaggagaaaactcacttttccgtagattcagctgaagtcctgaagctggtattcattgactctgttaggcctccatagtgtcttgtgcccactcctggatcagttgctttggctggaaaatgctgtattctttttagcctggccagacttgtatgttcattcctggggctagtgggtgaggtcaaccccttctgaactggtcagcctcttctggattgagtggagtggatacccaaaggaaaaaaatgaatgtgatgttttagagagagaaataacaagagctcaatatactttttgcattcctctggaatttgtggtattttaggatggaagtagaatggtggtcagctaacaataagacaattcttggtgtttttacattaactacaggtaataattaaacttgtgcggtaattacatggggaaaatccctctcattaatttcaatactaaatatggtatctttccctttttttgcattattaagcttactgaaatatacatagcaaaaaataaaatacagaaggccaggcgcagtgactcatgcctataattccagcactttgggaggccgcggtgggaggatcacttgaggtcaggagttcgagaccagcctggccaacatggtgataccccgtctctactaaaaatccaaataacagttcaattccttgaagcagtaaagctttgagctgcactgagaggagactagactgcctaagtcattacagctaattagccgttagctcttgtgtggaaaaaatggcagaggagcatgaagcaagtgctgaagatgcctcagaattgtcaagaaatgttataaataatctctttctctggtaaataagggtaactttttcgaccacattagctttttttttttttttttttttttgagacgaagtctcgctctgtcacccaggttgaagtgcagtggcacaatctcagctctctgcaacctctgcctcccgagtccaagcaattctcctgcctcagcctcctgcctcccaagtagctgggattacaggcacctgccgccatgcctggctaattttcgtgttttagtagagatggggtttcaccatgttggccaggctggtcttgaactcctgacctcaggtgatccacctgcctcagcctcccagggtgctgggattgcaggcatgagccactgcacctggcccacattagcttttgttgatatgatcctgtgaggagtcttgcctcaataaaccaaaggtagaccaaatgttctttttttcttcctttatacccctactcccgctatttctaaggtctctgtccttatagcagttcaagatccttatgaacaaaacattcataccctttgtctcttcccacccttttcagtgttgtatttaatatttctatgtcatggccttaaaatttcagaaaggggagaaagcctttcagggagccctgtttattctgttgtgccactgagttcacttggtcttgaatgaggaaatgtaatcagaagagtgtgaatgcaggctcagccagctctactaaacacctttgaggtatctatatttcatattacacagtagacctgaccgttggaattcgtgtttcttcagtattattttaagaaatcaggtaaacagtgaaggttagatatagcatgaagcaaagaccatttaatttttagtggaagaaatatcagtatttttaagcctagaaataaatagattgcttaatctatgttaaaaacccacaacatacagctgaactgcttccagtcctgatttgccagagtccaaatctaagatatgggcttttacttaatttatatgtagctgagaaatatccatccccagccctaagtcatagaagtcccttgtcctcaccccagtgaatgagaactagactgccagcttaattcttgggaaatccataattcttgtcttattatttttcagtgccacattgttattacaattagtaggtgagttctctctttgacttcaataattctttctacttaacctgttttcttaaaggtattgcaaataaaagtatatcaacagattaatgcattccagctgaacgttttagcctttttagtttcagctatccacaaatcaagccaccgagtccagctggtaggtttgtaaccattttgccaaaaatgtcttgagtttggggacaggaattggaaaatcttaacccaaagtattttaaaatgtattgtatttgagaaatgggaaaagaaacaaccacaggtatattacagctattgtgtcatctgccctcttgtgtctaatacctgtcctttgaacagcctctcccactaggtctggatggaggataccttaaagtgaaatgacagaccaggagaataacaacaacatctcaagtaacccctttgctgctctttttggctccctggctgatgccaaacagtttgcggcaatccaaaaagagcagctgaagcaacaatctggtaagtggaggagccaatagcagcaaataagatgacctagaatggggtcttcccaaattaagtattctttgagtccttaattgcaattggaatttaagtttggaacaaaagttggtttttgtttgtttgttgagagcagaaattggggttttttgtttgtttgcttttattgttggttttgttgtgagtccctcccctccgctgtcctctccactgtacaaaaagagaccaggtaacaggtggttccatagtaacagatgccagtcgtgatcccaaagctgtcaggctgttttctttaaaagaaaaaaaaaatcacctagtaaaagctatttaaataaatgtttttaacatgggacacagaggtggtaagtgtaggtgtagaaagcaagtcatgtgcagctatagaaagcagatgtaaaaggaagaactataaaagctttttgacctgtaggcaaatgagacttgttcttaagctcagcacttcaaaggccctcccaagcaaagtgcttcttctgttccgatgagtggcatcatttgtagcttagtcctgttaggacagacttttttaaaaaatctgatccttagccttactatgaaaaacatcagaataacatctcagtaatcagaaaaaatggttttctttcaggcaccgaatttaagatcaagtccagcttcctcctataaggagacatatacactagaagaattaggatttttctcaaatatgttagtcttctgaagatattcacaatctttcaaaccagaaattgctccccttctcctctctccgaaaagaataatagtgtttttcttttgagagaaggagaagtgtttgcattttccctttattttgtttatttaaaaaaaaaaaaaacactcaggtgcatagctgacttttggcctttcagttagaaagggctgaagaaaaaagaggtaaaggcaagacagataagtgattgatgcaagggaaaaacaaaatcaatgttgattttttttaacatggtattttcagtctctgaaatctctcccagatttctatgatacggggccagaatgggaaactctggtttagaagattgtaggggaaaaagcagagtgaaaaataggaaaaataaggaatgagaaagtatgatttatgagtatgtggttgagggaaattttgctaaacagattcttagcttctgtcaccattggaggtcagagaaaaactcaacagtatagcagctgagcaacagaacgcttgtccttctggctataaacagacataaatctggctagagttgggagcattgcaggcacatgcccttctgttactattttggcacctcatcatcctagtttgtttacactgagtttatcatgccaccaggtccaacctgtttccactagcaattagtactttgccaaaacctttggcttcctatgttgagcttatactcaccacactgaaacaactcttactttgagagttttacctggactttcagactagccattctgtcaatagagaaaagtacatatagactcatatgtggcatatagtgaataacactacttttatgtagtcattcaacatgaatgatggggctgggcgcagtggctcgcgcctgtaatcccagctccttgggaggcctaggtgggcagatcaccggaggtcaggagttcgagaccagcctggccaacatgacaaaaccccgtctctactaaaaacacaaaaattagtcgggcatgatgacaggcgcctataatcccagcactctgggaggccaaggtgggcggatcacctgaggtcaggagtttgagaccagcctggccaacatggtgaaaccccatctctactaaaaatacaaaaattagccgggcgtggtggtgggcgcctgtagtcccagctacttggctgaggcaggagaatcacttgaacctgggaggtagaggttgcggtgagccgagatcacaccactgcactccagcctgggcgacagagtgagagtccatctcaaaaaaaaaaatcaaaggatgggagcagattttgaggacagaagtttaaaaaaaaaaaaatcgaaggaatttcatcaataagaaaaaaataacaagaaagaataaaaaggtacaaaagatgtgacatgcaacttataaccaaatgattaaaaaatttattctcatcaatcattagagaagtgccaattaaaacaaccattaaattgtttttttacctatgaaatttgtgaagattcaaacaggcactctctcatatactgttgggtttgcatgtaaatcagacagtctctttgagggtaacttggtagtaaatgttaacttttttttttttttttttttgagacgaagtcttgctctgtcaccgaggctggagtgcagtgcaacctctgcctcccgggtttaagcaattctcctgcctcagcctcccgagtagctgggactacaggtgtgtgccaccacgcctggctaattttttgtattagtagggatggggtttcaccatgttagccaggatggtctcaatctcctgacctcgtgatccgcctgcctcagcctcccaaagtgctgggattacaggtgtgagccaccgtgccaggcagtaaatgttaactttttaaatgttcaagctctttgatccagcagttctgctactgtgaatttatcctatagaaatactcatacaagtaaacaaaaagagttaagttgtattgtattcagtgcagtatttaaaatcatgaaatattagaaacaaccctattgttcatcagttgaaaagtagctacataaaccacagggcatgcaaaagatgtgatacaatacagctattaaaaatagtgaggtaggcctctaaatggcctaacagggaaaggtgttggtgctgattaaaaggcaagctgaaaagagctatgtatagtatcccattttttaaaaaaattaaaaagatagtaatgaatattagcaccagaaaagaaaaaaattcttgaacactgttaagtgtctttagggaattggttcaggagactttctatactatatttttctgtacagttaagaactattaaaacaaatgttatctcttaaaatcagggagaaaagccatacatttaaaataattaaaggcattttgatctattaggtaattctttgttcactaggattctgtagagaagataactttgctatttctggcagtgtggagtataattatggatagaaataaaacttttgctttgtaaaatgtggtaggatttatagccaggaatttcaaaaccctatatttaacttccctgacttgagatgttcactaattagatgattagcttgttttacatctgaaattatcatcttcttggttacatttattatttttggtagcatgcttggttctctcttaaaggggtgtaacatttaacagtatacattttctggcagatgaactcccagctagcccagatgactcggataatagcgtgtcagagagcctggatgaattcgattactctgtggctgagattagccgctcattccgatcacagcaggaaatatgtgagcaactcaacatcaatcacatgatccaaaggatcttccttattactctggacaacagtgagttacaaacttatagcattattctacccttcctatttgagcttgggctaggggcttgctctttgaaactggttacagctaatggttagatacaaacctactcactgcactccctggaactcagggtttatatttcagtgaaccttttggtatgacctaaaaacagtatttagatgcagatctaacttttgttcccatttcaatactgactgcactatatagctacttgcctttactaccttaaaaaggaaatgggaagggtagccaaacccattttcttctcagaggtaacctaaatattcagatggaagccttcagaggcatcagagagtgtttgccctctgtgccctgtctgtgtttaaaccccaaggttggtactaatgtctgggatttactctttaaatgtcatgatgctaggtttataacaaatcccattctctgtgactagagggggaaaaaaaaagatttgaatctttagatgttgctttgtgtatcaggatcattctggtattacttgagtcagatttgcagttcaagagtgatgctgtcaagatcagttgtctgtataaaacagaagcattatccttaacctatcatattaaaaccatttcccaggtgatcccagcttgaaaagcgggaatggcatccctagccgttgtgtgtatttggaagaaatggcagtagagctagaagatcaagactggcttgatatgagcaatgttgagcaggtaatattcttacgttcctaatgtgtgcccttagcaaaaattagctatgcggctgaattctgctcactgttctccaacttatgcttgtgtccatatgtccatccctctctctttttttttttttttttttaccagtagaaggccaagtaacctggatgtgcatctctaacattgtggtgttcctcttttggaatcttttcatctaccatggccacatgcccaaatctacccatcctctaagaaccagttaaaatgccttcttaattacaaagccttggccaggcacattgactcacgcctgtaatcccagcactttgggaggctgaggcaggtggatcacgaggtcaggagatcaagaccatctggctaacatggtgaaacgccgtctctactaaaaatacaaaaaattagctgggcatggtggtgggcgcctgtagtcccaactacttgggaggctgaggcaggagaatggtttaaacccaggaggcggaggttgcaatgagccgagatcataccactgcactccagcctggacaacagagcaagactccgtctcaaaaaaaaaaaagaaaaaattacaaagccttgccaaataaaagttgttactccctcctctgggtacctagaataatcagcctctgaatctcttgtgggaattgtcactttctgtctcatgttgcggctttcttatgtacctgtcttatctcccctattagacttaagttcttaagggcaaggcccatcgctttttcttctttatatcctttctatcttagtctgttttgtgttgctataaaagaatacctgtgactaggcacagtggctcacatctgtaatcccagcactttgggaggccaagttgggaggatctccaggccaggagttaccagccctggcaacataacaagaccatgtttctacaaaaaatacaaagaattaactgggtgtgatggcatgtacctgaagtcctagctactcaggaggctgaggtgggaggattgcttgagcctgggaggcagaggctgcagtgagccatagtcacacgactgcactccagcctgggcgacagagcaagaaagacccatctaaaaaaaaaaaaaagaacacccaagcagtaatttataaagaaaagtttatttagctcacagttctgcaggctgagaagattcagggtatgtccttggcctctggtgagggcttttgtgctgcctcacaatgtggtggaggaagtcaccaaaggacacataccatgaggacgcatgcaaggaggagaaaacctgagaggtgtcctggcttaataagaacccgctctggagggaatttgtccattcctatgagaattaatccagtcttgtgagagcaagaactcattcagcaccttgagaaaagcaccaagcaattcaggagggatccgcctccatacccagacacctcccactagccccacctccaacagtgccacatggagatcaaatttcaacatgaattttgttggagacaaacatataaaccacagcactttaaaaatcaaaacagtgcgttgtaccttgcaggtgcctgagtaacattaaaagaataaaagtttggtaggaaagacagttgacagcttgcagtttaacttcacatttggagtatctttatataagtctgaatgagatcagcaatcacacagaatagtagatttcacatctaagtttaatcactgatctcagcaccattcaacaaatagtcttttaatgcctactctatgctggggctatactagacacttgaggcttgatttaggataactttatatatgccataattttctaaaattttctaaagtaaaaatatacagggccctttttttctccttcactctacattcaaatctgtgattcttgctaataacctgtgtcagaattaccttttacatcttaatgttctcagattaattttgcaatagtttagtatttttgtttggttttctttataggccctcttcgctcgcttattacttcaagatccaggcaaccacttaattaacatgacttcttctacaacgctaaatctctctgctgatcgagatgcaggagagaggcacattttttgttacctttactcctgcttccagagagccaaggaagaggtaaaggaataatccccattgaatactgtattgtcctcttgggtatgacttcagcatgtgggccagagttggatcagtctttatttcaatttatatatgtcatagtatgtctagaagtgaatatcagggacactaaagcttttatatcaatttatatatgtcatagtatgtttagaacactggatatcagatgcactaaagctttagtctcctttccgtatcttggggtccacccttctccccagttaaccaatgcctcctattctctctaaaacctctttagaaatcacatccttaaaaaaatctcatgaggctgggcacagtggctcactcctgtaatcccagcactttgggaggccgatgcaggcggatcacatgaggccaggagttcgagaccagcctggccaacatggcaaaacctttactgaaaatacaaaaattagccgggcatggtggcacacatttataatcccagctactcaggaggctgaggcaggagaatcacttgaacctgggaggtggaggttgcagtgagctgagatcacaccactgcactccagcctgggtgacagagcgagactctgtctcaaaaatcagaaaagggctcatgaattcatttccactgagatgtaaatattagagtaggctaagccggatatttccaggtttggaattttaaataggcagatagatgattccttaagccaaggaaggaatctctaattaattttcaagcatccacaggagaccagtatgtctcttctattgtattcactatgtctactttcgttccagattacagagttagactattccctcttttcttcatgctgtttgcagattaccaaagttccagagaacctgctaccctttgcagtgcagtgcagaaacctcactgtgtccaatacccgaacagttcttctcaccccagagatctatgttgaccaaaacatccatgagcaactggtagatttgatgttagaagccatccagggagcccgtgagtacatgaacaagatctgtaagcttctacattttgattttcagatttaaaatttcactaattgcattagaaagtctcagagccattatggttctggtataaattaaggaggagggctcacatcttgatctttgaggttgagtaccaatagaataaagctgggcatggtagcacacccctgtagtcccatctactctggaggctgaggcagaaggatcccttgagcccaggagtttgaggctgtagtgtgctataatcacacctgtgaatagccactacactccaggctgagcaaaaaaacaagacccccagctctaaaaaaaaaaaaaaaagaattattgaaagtaaagagctagtgtgtaaaggcatataaaaattcttgtgccctcctttctctctcatttgtcttctgttagattttgaagatgtaactgagtttctggaagaggtcattgaagccttgatattggatgaggaagttagaacatttccagaagtcatgattccagtgtttgatattttattgggccgaataaaagatctagagctctgtcagatccttttgtatgcatatctggatattcttctctatttcactaggcaaaaagatatggcaaaggtaggtctgaaagatgatatgtattcagttgagctagatgtgtaatacatgatgcttccctatcctgaagacactataatactacctataaaataagaaaaagatagcttggttgttgtatcaacttaactgttttgaggccctcccaccccatcaccttatctcaccatgaagatgaataagcagaacttgtcttctcttacaggtttttgtagaatacattcagcccaaggaccctaccaatgggcaaatgtaccagaagaccttgctgggagtaattctgagtatctcctgcttattaaagactccgggtgttgtagaaaatcatggctactttttgaatccatctcgttccagcccccaggagatcaaagtacaggaggccaacatccatcaggtggaactgtttaccagggtatcccagccccctgatcttaaaagagttttctcagaaagcagatacagataaggctgctcaagcctctctgggaaagcaaattgatctagttggcttttacatcacataaataaattaaaactgggcatggtagctcaagcctgtaatcccggcactttgggaggccaaggtgggaggatcgcttgagcccaggagttcaatttgaaaccagcctaggcaacacagtgagacccccatgtctacaaaaaaatacaaaacttaggtgggcatggtggcaagcatctgtagtcccacctactcgggaggctgaggtgggaggatcacttgagcctgggaggtcaagacttcagtaagccatgattgcatcatcacgctccggcctggatgacagaagaagactctgtctcaaaaaaaaaaaatcccctctttgtagcatatgctaagaacagcacgtgtggggtaagaatgagctgctgctactcattaccctttgctgtagcactgctacagctacttctccccaaccctcatttttctcactgagctataactttagctctgaaaatcttttgactgaactctagcttataaacccagtttttcttccttttcgtgtctccacctatgccctctctttgggcttcttcacataaattatagtagaggtctggccaacatgaggcattgaatgattgaattggggatagtttaagtcccctaatcattaatcattacaactctctaaggcaaggcatggcaaactagcagtggccaaatctggcctgccacctgtttttgtaaataaaggtttattgaacatagccatgcgcattagtatatgtattgtttctggtttgaattcatactacagtgatagagttgaataattgctacagacactgtatggcaagtaatgccagaaatccttattgtctagccctttgcagaaaaaatttacagacctgtgctctaataccgtgtaatgccatctgcagttgggcagctgatcagaaaatctcttataagtgcccagaaatatattttaaaatcaaattaggggatgaggcacagagagtgaggggaaagattaggattagcatatttttggaaactgccagttgctaaggtttgggaataaaaactattaggattgtgaaacgttctgtggttgtgttttctggttgaacagttcatggctcagttccacgaaaagatctaccagatgctgaagaacttactccagctctctccagaaaccaaacactgtatcttgtcctggcttggaaactgtttgcatgcaaatgcaggccgcaccaagatttgggccaatcagatgccagaaatctttttccaaatgtatgcctcagatgctttctttctgaatctgggtgctgctctcctgaagctatgccagccattttgcaaacccagatcctctcggctcctcacctttaatcccacatactgtgccctcaaggagttgaatgatgaagaacgaaaaattaaaaatgtacacatgagaggtaggagagaaccaggcttctcaaaactgtgtgtgtgtgtgtgtgtaacgtgtaaagcattcactcccttatcctttttcacagagttcctttctcaaaaaaagatgaggcagaaacgagctatttcgatttttttttctttttttttgagatggagtcttactctgtcactcaggctgtagtgcagtgacgctatcttggctcaccgcaatctctgcctcccgtgttccagcgattctcctgcctcagcctcccgagtagctgggactacaggcacgcgccaccacgcccagctaattttgtgtatttttaatagagacggagtttcaccatgttggccaggatagtctcgatctcttgacctcatgatccatccgcctcagcctctcaaagtgctgggattacaggcgtgagccaccacgcccagccagaatttttaaaagacagatgtttgagagaaaaaaaaaaacacctggtagcttttaaatgttgtactttagtgagaccttctctctggatttggcagccttgcatattcattcattcatagtttataaaaatgaataaagcagagtcctcatcctttttgaactcaggctccagaaggcagatatattaactgataattataatatggtatagggctaagctatgggagcacagaggagggagtaaataatcaattctgcagaagttggaggtcttcatagctgagtcttgagagacaagttaggttttaccaggcaaagaagcaagagggtccctttatacagagagaaaagcaagtgtaaaggtacaaagctatggaaaatcttgactaaggaatggtgagaggctcaatgtggctagggcaaggggtagatggggttgagttggggaggaaatggatcaagggaggaagataggtggggctggattggagaaaacagtacagagaaatgaagagaaaataaatgactcacagtcctaccattcaaagtgaaatcactcttaattttggtatatttcattccagttttataattctaattgtaaacatgataactgctcaaaagcaaataatcaaattcagaaaagcacaaaataaatacaaatgatctattgcctatcacttgaaacaatctatagtagtattccttttaatttttggtgatttcatgaaaaagatttaactgtatttctgtagacggtgagaaaccaaaagatatattcagacaaagaactaatatgacaagatatgtttttaagaagatatcactgctaacagtatggaaattgaatgagtgtaagaggagactggagaccaagacatttaccctcttttttttttttaacttctttgaggtttggacaaagaaacctgtttgatcccagctgtgcaggagccgaagtttccacagaactacaaccttgtaacagagaaccttgctctgacagagtacaccttgtacttgggatttcacaggtaactcctctgatgtcattaggaaaaaacagtttagttgtgttgataactagaaggtagaaattgagtctttggccaggcacagtagctcacatctttaatctcaggattttgggaggccaaggcagaaggattgcttgaggccagaagtttaagaccaccaacctgggcaagaaagtgagacccccatctctaccaaaaaaaaaaaattagccaggcatggtggcatatgcttgtggtcttagctgcttcagaggctgaggcaggaggattgctctagccgaagagttggaggccacagtgagctatgattgtgcaactgtactccatcctgggtgacagagtgataacctgtttcttaaaaaaaaaagagaggaagagtcttacagatataatctgagcttattctaaaggttcacattagaatctaatagaaaaggggcattgtatgaatttacttgtgtttcatgaatcagctttgtccagattccttaaatttgtttttaacttttatcgttgtcgttgttgttgaaatggattttcgctcttgtcaccttggctggagtacagtggcacattctctgctcactgcaacctccgcctcctgggttcaagcaattcttctgcctcatcctcccaagtagctgggattacaggcatgcaccaccatgcccagctgattttgtatttttttagtagagatggggtttcgctgtgttggccaggctggtctcgaactcctgacctcaggtgatccaccaccttggcctcccaaagtgctgggattacaggcatgagccactgtgcctggcctgttttttaacttttgacctgttaaactttaaaaattaaatcactgtcttcctattgtgatctgggaaagtggaattgttttcattttatattgcactttctgctcttaaattttcattactggccgggtgtggtggctcatgcctgtaatcctttgcactttgggaggccgaggcaggcagatcacttgagcccaggagtttgagaccagcctgggcaacatggcaaaaccccgtctctacaaaatatacaaaaattagctgggcatggtggcgtgtgcctgtagtgtcagctactcacgaggctgaggtgggaggatctcttgagcctgggatgttgagactgcagtgagccgagattgcgccactgcactccagcctgggcaacatagtgaaaccctgtctcaaaaaaaaaaaaaaaaatttcattactactcctggtgataaaagatgaagttcagccgggcgcagtggctcatgcctataatcccagcactttgggaggctgaggcaggcagatcacaaggtcaggagatcaagaccgtcctagctaacatggtgaaaccccgtctctactaaaaatacaaaaaattagcccagcttggtggtacgcgcctgtagtcccagctactcgggaggttgaagaaggagaatcgcttgaacctgggaggcggaggttgcagtgagccgagatggtgtcactgcactccagcctaggcgacagggcgagaatctgtctcaaaaaaaaaaattaattaaaaaaaagaaaaagaccaagttctactctacagatagagacaaaagtggcaaatattaaggaaatgtttataagggagctaatgagatcaataggaccacaaaagacattagataaagaagattctagaaatgttaagattttagaactagaatgtatgacttccaaaaacagttctggttctggctattcattattctgtaatttgttttcctctgatttagctgattatgacaggtataagtagaggaagaaaacagcaactcagtcatagaaagggacactaagaatagcaatttttaatgccttctcaagatacctgaattgatgcagagcatttttcaaaactactcagtcaacacattgccggaagaaggaaattatgtctttagagagaaatctccatcatagacattttaaataagacagtagataaaagttcagcatgtgcttaagctgctcagctgcctagattcaaacaaaaaatgaatatcatctagtttcccaatattagctagctcaagacattatctacagggccaaaggaaatgattttggactattatccataactttgaattatgtgtcttcctttcagtagagaatattaggctgaccttttctgaagaataatttaatttaatattgaacaacagagagctggaagctgctcttagattgcatctcaggtggctactagtttatatgtggtcattactaatctagagtcccttttcaccagcttagttttctactaaccaaagaaagactatccatataaccccatcaaagtatgatcattgcatcaaagtatgatcattgcccttgtgtgatgtaaaactatcctgctggccttcttgtactttgcctaataattattttatgtaataacaacccattctacaccctactcaaccaagctgcctttctttggatagtgcatttcaactgaaggctgctatttgcaattagcttcaattatgttgaatacttggcagcattttcccattgctgtgcaccctgcctgtgtcctgtcaaaaacttttgtgagtgccttctgtgtcattgcaactgcaactccctactatccttaaagagaaggctagataaataattgaggatttgtttttttgtgactttctgttttccctgacccagtctcttctgctttcttgggggcaggttgcatgatcagatggtaaaaatcaaccaaaatctgcatcggctgcaggttgcctggcgggatgctcagcaaagttctagccctgctgctgacaatcttcgtgagcagtttgaacgactgatgaccatctatctttctaccaagactgccatgacagagccacaaatgctacaaaactgcctaaacttgcaggtgtccatggctgttctactggttcaactggccataggcaatgagggctcacagccaatagagctaacctttcctttgccagatggctacagctctttggcttatgtgccaggtaagcaggctctcccttgggaatgtcctgtttatagccttctgagtttaagtgggtcactttggaagtttaatcctcaaaataccctttcttcgttatcattcagttgtttttggagaaacaactcaaacttagataatatctactggtcaaagtattaggggactaacagtttgttccctcaaccttgtgtccccctgctatgcatatcagaaaatcatcttcaaaggattaagtgtaatcagagttttcagagctgttagtttctatcattaatatttgttcaacttacacattcatctaactttccctgtcctttttgtagaaaaaaaattagctcctgctggttaactcagaagggaaagagtgtgtgtgtgtgtgtgcgtgtgtgtgtgtgtgtgtgtgtgtgtgtgtgtgtgtgtgtgtcagtgagtcattgaggggtgggcaggtgttgtcaatctaatcaggttatgtgttcttaaccattgtattggccatatcatgctgagtaacagattaccccaaaacatagcagcttaaaactacagactgggtatgatggtgcacgcctgtaatcccagcactttgggaggccgaaacaggatgattacttgagcccaggagttcaagattggcctgggcaacatagagagaccctatctctacaaaaaataaaaaattagccaggcatggtggtgcacacttgtagttccagctactcaggaggctgaagtgagagaatcgcttgagcccaggaagttgaggccacagtgagccataattgcactactgtactccagcctgggtgacagcaggaccctgtctcagaaaataaattaattaattaataaaataacaacaacaactgcaaacagctcactcacctgcattgttctgactcagagttcctcaggaagttatatagccaagctgtcaatcagggccttaggaatctgaggactctgctagggctggaggatccacttacaagcccagtcatgtggttgttgacaggcctcagttgcttgtgctattggccagcagcttcttttctaggccatgtatgtgtcttctaaatactactcatgatatggcagctggcttcccccagagcaagtgaccaaaatggagactgtaagcttttataccctaatcttggaaatgacatactatcacatctgctgtatgcctcagagtttatcttctactctgaaagagtgaatgtgggaggggactgcataaggtcatgaataccaaaaggcaatgatcattggaggaccatcctggagtctggctaccacagtcacctaacatattaatctttattagagagtcctcacacatctgaagggtttaaaccacagttaaccttgagagtaaaaatgtatatattagtatactggtgtgttaacattttgtgtcattactgttcatatatttacttgaataaaaatttaaattgacttacatttaaaggagattttacatttattgacttaacgaccatctctagtaccaacaaaacatttagggttttttttaaccttcattaagtagggtgaaaggaatttaaatgttgtttattagtacagatatacagatgtttggctaattccagtgaatattttctttttcagaattttttgcagataacctgggtgattttctcatttttctccgccgctttgccgatgacattttggagacatcagcagattccctggagcatgtccttcactttatcaccattttcactggaagcatagaaaggtgaagtgctgaaagcttggttctgtcactgtttaggctgtaaaacattcagaagacttctaaaccaagaaataaacaagcctgaatcataaggggttgccttcagaagttatggtaacattaaggaatcacctgaccatccatatgggtagccagaaatcccactgttgagaggtataataaacaaaggactttgtccacagagaatttaatcctgcatataagtatcttatgggaagtccactgccagtccctggttaaagtagttaacctaatgccagaaacttaacagtggcagccaggtgctaatgatcttctaataattatatgataataaagcttattcttgctattctgagttggatgagcagtaaacttaagtcaatgttatttctcatttcaagttttctcactcatagcttctagtcctcttttccaaaggaagatactgtgacttgtagaattgcttccctgatttttttgatgcataggctaaaggaagtggaaactctgtgtacaaaagtgaagatttgctgcacaatgaagagaatgacccacaattccctgagccgtatcagtgataagtagagagaagccatttcttcactgagctgagcatacctaatgagaagtcataagtcaacaagtattatgcatacactgtatgcgtcatgggtaatgtagcataattatattctagtctttaccctcagaaagcttgaaaaggcaagtttattccacatgaaactgtcagagaataggaagcagtaaataatgcattattacagagaagtaaacaatggctaagcattcaatagaaacttaagtgctcaccgtcatatttggtaagctgtcaactcaagagttaaatgatgtaccctgcatcaccaccccaccccccgcccagccgcaccaagaaactgacaaacttaaaactgcagaagtggatccttttttttcctgtaatatggtttagggtggattttgattcttatgtggagagaacagagtcataaatttggagttaagcttatctgctcatcttgctttttgcccattttgcagaatgaagaatccccacctgagggccaaactagcagaggtgttggaagcagtgatgccccacctggatcagaccccaaatcccttggtatccagtgtgttccaccggaaacgtgtgttctgcaactttcagtatgcaccccaacttgcagaggctctaatcaaggtttttgtggacatcgaatttacaggtaaagcagtcatgaagctgagcccagaactgggaagctgataccagtggagtttcatagtttgatccgtatttggatatcaaagaaatgtcaagccattacttattgaatacctactatatgccaggcttgatgataagtgctttttttttttttttaacattatcccattgtcaccattggaaaagtttcactctattatccctgttttatttattttttattttttaattattcttgttttacatatgaagacatgactgcccaaaagatcagtttgtccatgtcataacaaactaccaagtggtagaatcaggtctgtgtcacctaaagaaatctacatattcaacacccttattatgttgcatcatcaaatcagactcaaattagactatttgggtctttatatttctctgccttaaaattacagaatagtgcataaagaggcagtgtattggttgagagattcttttatcttaaccagactatctaactctccaacagtctaatggttcgattaaaaataccagcaggcggacaggcacagtggctcatgcttgtaatcccagcgttttgggaggccaaagtaggcagatcacttgagctcctgagtttgagaccagcctggccaacatggtgaaacccattctctacaaaaatacaaaaattacccaggcatggtggcaggtgcctgtaatcccagctacttaggaggcagaggcacgagaattgcttgaattcgggaggcagaggtggcagtgagctgagatcgcaccactccagcctggatgacagagcaagaaatccctctcaaaaaaaaaaaaaaaaaaaaaaaaccagcaggcaacattccctctctatctaaccctgagcccctgtgtttgtttaaacagtaccctgtctcaatcagtaaataagatatgttaagaagttgttgaagaccattttttaaagggatatctaccatccaatgataaatacaactaacatttaaagaggcatttaacattttactggccgcctttccatatttggattctggttttttttaattcgctcacctatcaaccttagtttcctcatctataaaatgggtcaaagtgatgattaagtgaaataatgcatgtaaatctttataatacataagaaattgtataataaatcattgcagttatctcgttatgtgaccatacaaccaaagtgttgtaatggagtacaatttctgttttatttctgaggaagtggaagctgaagaagattaagagacttagattaagcagagccagaatgaaaacgtaggtcttttgactccaaatcctacactcttcctttattatgacccagcctgtggagctctagtaatacctttggtatttcaaaagcagtataagcctcagatttttagctcctgacctgatttttcagagtaatcaagaacctgttggctacacagtttgggatattgtctgtgaagaatgtgggaattgcttagtgtcccgtcctgcacatggctttcactgccataatggccagccctgagccctcatttaaagcctgagaagtactcatgtttggatatggaaacatttgtttcccttaacttttattttacagcttggtacttgtctcttgcagagtaaggtatcctttatctctgtctcccccttacttcatcagtaaggaaatgagcaaacacttggcgataactctaggcctttagaaactccagggcagattttgttagtagccttaacacactcaaaagcaaatgactacaaagcaaatggctacacataagcataaactcttcctcttatggcaccgcctttgctgatatttcgctcttgccttactccaggagacccccatcaatttgaacagaagtttaattaccgccgtcccatgtatcctatcctaagatacatgtgggggacagatacctatcgggagagcattaaggtgagagagtttttgatgaaacctgttgctttatataagccctaatgagttgtaattcagtactaaaatggttttcttgtgggctgggacttacaggatttggctgactatgcctctaagaatttagaagccatgaatcccccacttttcctccgctttcttaacctgctaatgaatgatgccatcttccttttggatgaagccatacaggtaaaaaaaaaaaaaaaaaaaaagatttaacttctccataccatcaaatcatcagcagtacatacattttaccttttaatcataatagagcagtccttatgcccctagtaccagacttgaacaccaaaaatttgtgattagtagtgtaccaccaagcttgtcattatagagctttctagttcattccattagagaccaagatcaagggtcattgaagcatcatgagatggacattttggcagagtcaaaaataccatatggtgaagccaaactaagttgtactggcaggagtaattcatcaggccagcactacagaaagaaatcagaggagcttgcttttggtcagtgactttcaacccttttaatcccaacatgtcagtaaaatatctcactaagacagtgatttttaacccactttcctaaaagattctgatttttgcaccactacttgaaagaaaatctctgatttgggttattttttcatataaaggctccaagttgtcaatacttctcatatttccactgccttctaaattcttagctatatggtgaaacaaaggtttcacaaagtataaaatgcagctgggtgcctctcagctccttcagtgtattatttccttaaccttccctggtggaactgcttacttctcccataaaaacttggctgtctgtagagcaaaacttcccttacctgtgatgggtataggatggacaaggcactgacctaaagggagatgaagcaggtaaatcctgagggtagcctttagacagtcatgagctcctccttatgatcagcaatcccctgagtagcttgtgtttaatttgtgagaaaggtttgatctgatttcttcataatcctacgctttaggatttaagataggttttcttcaaaagcgagaataggtcctgttacaaacaggcccttttaagcaagaggtgtgtgacacaaagcatgaagcagatggtattttcatgagactgtaagtttaacaagttgtttgctacaacaggaaggatgacgtgaggtagagagttttaaataattatggttcttccacgcatcttgcatatgtgatagagctttgatttttttgtaagcaatttggcaggggggatttgttttcatctttcaggaaggattcattgttttttcactatagtgtggggttttttagttttttgtttcttggcctgggtttcatatattaaactattcatccttctttgcatttcacaatgctatactatttctaggggaattacctgtgaatctacccaagctgaaacaaatctgtatgaagccacaatttctttttttcctgaaagttcttttgagcttcagccttatgctgagaaataaaggctcatgtcttttacatggtccctcgttttcccagcttagttgactggattttgaataggacctcttaaatgtcacgtcccttcaactgcacctttcttctctgatatatcccatctctggtttctgcagtatttgagcaagataaagattcagcaaattgagaaggatcgaggtgaatgggatagtctgactccagaagcccgccgagaaaaggaggctggcctacagatgtttggacagctggcacgtttccataacatcatgtccaatgaaacaatcggtacccttgcctttctcacatcaggtaaggacatgaagtactgcttccccccaaaaaagtaatggccaagatcagcttcacttgggggatcagcccagctgaaactaagaattcagaccctggtgacagtatcctccacatctggaagggaaacgaatcacttgagaagcttcaaaaagaatgatgatgcccattgttgacatggaagtgaggaaatggtcaccctcacacagctgccagagagcataaggtggtaaaatctttcttgaggacaagttagccatataaatatatgtgtgtctgtacacacacatatatacatatatgtttgttaatctgagaaatacgcttgaatcctggttaaatatggtggatctaacagaaatttatctctactccttctatagctccactgtccaattcagtagccacttgcaacgtgtggctttcaaggatttaaaatgtagctggtctgaattgagatgtgctataagtacaagacttagtgttaaaatgtgaaatctgtccatttttatactgattacatactgaaattatcatttttaatgtctcagctaaatgtgatatgacaatcagtaatcaccagacatttgaggaaatcctctaatgtgaaaaacaaataggtgaaaactttgtaaaaactttttaaaaaaactttttaatctcagagggataagagaagatacagcagccacaaaacaagaacaaagaggcaatgaaagagattatttgaagaataagaaagagcccttggatattgaaatttttacctcggaaatgttaaatattcagtaaaggagttagaagatataaattcaaggaactcttctatgaacgtagaacagaaggaaaaagatggaaattagaagagaaaggataagaaaacaaaaggatggatctaggaagtctcaaaagcgaaaaatggaggggaggaagttatcaaagataccaaaaaatccccaagactcaaagacagcctctaaattgaaagggcttgccaaggcccctgcacagagaattttttaaaacccacagtgaggtatgacattgtgaaattttaggaaatcatggtaaaaacaagaccctaaaatagcccagagaagtcaggtaatgttaccatagtttaagtatcaaaatggctttgcacttccaacagtgtcatttgaagctgagacacatttctgagggaaagtaaacctaggaggaggaaggtggaattcaacacaagggagacgcaaaggagattcccaggatgacggtgaaaggagcttgtgtggccactacatagcaggcctgtagagcaagcagtccaggttggagcaaaggatggaaacatccagaaagaatgtttccaaaaattaatcagcagctggaaatgaccatgttgagagttttaaattccaatggagagtttggaaaggatttagtgataagaggctctgaaaataagcaaataagcaaaaagttatactaaaaaggaactatatactcattaggacagcacatggctctgctgtgaataatatttacataatcttaataacaaactaaattatttaagcaaaaatttgactatatattgagggcatctgtgataatgactaaaactgaaaaatcaagaactatcagtaccaaccaaacatagcattatgatactgtctgacttgttaaatttggcatgtataaattttttttaatttttggaattcatgccctataacatagcagttccttacagatttgttaagaagaagcgataggccaggcacggtggctcacgcctgtaatcccagcactttgggaggtcgaggcaagcagatcacaaggtcaggagttcgagaccagcctggccaacatagtgaaaccccgtctatactaaaattacagaaattagccaggtgtggtggcatgtgcctgtagtcccagctgcttgagagactgaggtaggagaatcacttgaacttaggaggcggaggttgcagtgagcagagatcacgccactgcgctccagcctaggcaacagaatgagactctatctcaaaaaaaaaaaaaagaagcgatgagtctacaagatgtatccacaatgaagttcattgataagtgtaggaaaaaactgaaaatagtaaaaatgtccaccagtaaagacattaaataaataacttatggtgcagttacaactggaaaagtcagccattaaaaatgatgtaaaacagactgggtacagtggctcacacctgtaatctcagcactttgggaggccaaggcaggaggatcacttgagcccaggaagttgagactgccttgaaccatgatcgtgccactgcactgcagcctaggcaccagcaagaccctgtctcaaaaaaataaaaaataatttttttaaaaaatgatgtaaaacagctgggcacagtggctcacgcctgtaatcctctaaccctttggaagccgaggcaggaggatcactttgagcccaggagtttgagaccagcctgggcaatatagtgagaccccatctcattttttaaaaagattatgtgaatcacccctattctatagaactttctgtgatggtgaaaatgtcctataaatctgggctgtccagaaccatacttaactagccacatgtggctagtgtgactgaggaatggattttttattttttattttaatagccacatatggccagtggctactatgttggatagcacagggacatacacttactaaaatgataaagtatttgcaatatagttactgaaaacagtaagtttcagaatatgtaaaatatgatcatttttgtttaaaaaatgtctgtgtgtgtgtaaataaggacagaaaagctagaaggacaaaatgttaaattagcaagatgttaacagtgtttatctctggatggtagtttttgtcttttctgttttttgtttggttttggttttttgcttgtctatattttctgcagtgaaaatgaattacttagttttttaaaaaagtagttccttcaaaatgtttagaaataaaataacagtagttcccagaggtctccaaataaactatacctaataaggaaaagagtgctaatggattgagttttcagagactttggattcttttccagagatcaagtcactctttgtgcatcccttcctggctgagcgcatcatctccatgttgaactacttcctgcaacacctggttggccccaagatgggtgccttaaaagtcaaggacttcagcgaatttgacttcaaaccccagcagcttgtatcagatatctgcactatctacttaaatcttgggtacctgagattgaaatctgtcaagccagaggggatgctgttttgatttagggttttgatagtagaatgactggttggtaattatgtgaaaatagaaaagaaatggttaattcctagttgcttgatgaaggaatcttctgtagttttaaataaggagattttatctgggcaaggtgtcgtgtgcctgtggtccaagctacttgggaggctgaagtgggaggattgcttaaggccaggagtttgagaccagcctgggcaacacagcaggactctgtctctaaaaactagtaagattttgtgtgacccatgggacattgagatttccagtattctgctttgatctgtgcaaagagaaactttactggttgtaccactgtttagaaaagtagcattcttttaaggtcacatgatacttgatagacttcctagaaagtctttctgtatcaaaaagtatatatattaaatatataatatatttaatatatattatttataatttattattatattttatataatataattttatataattataataaaatatatattatattttattattataaataataaataataaaataatatttatatattataaataatatatattgaaataagtctttctatatcaaaagaatgttcatggcttttaagtggtgagaatgcttgttctgcagcctacctattgtctcttccattgaccaaccctctggtgatcagtttttttctgatgctaatgttccagggatgaggagaatttctgtgccactgtgcccaaggatggacgttcctattccccaactctctttgcacagacagttcgagtcttgaagaaaataaataagcctgggaatatgattatggctttcagcaacttggcagagagaatcaaggtgaggaagaggaggaattgtttgctgatttcattaagaaccacgttgtcagccaggcatgatggctcaagcctgtagtcccagctacttaagagcctaaggctagaggatcacttaagcccaggagtttgaagctgcagtgtgctatgatcatgcctgtggatagccactacactccagccttggcaagatagcaagaccccatctcctaaaaatccatgcaaaaaaaatcagattgtcacctcagctgtgctgatttttactctatttcagggagaaaaagagcattaccaagagaaaatataaacagatggttctttttggacagtcacttagaactacaatattcttagttttattcttgtcaacatgagagtgagaatagaaatttaagaaatcggctgggtacagtagtggctcatgcttgtaatcccagcattttgggaagccagggtgggcagatcacttgaggtcaggagttcaacaccagcctggccagcatggtgaaaccctgtctctactaaaaatacaaaaattagctgggtgtggtggcaggcgcctgtaatcccagctactcgggaggctgaggcaggagaatcgcttgaacctgggaggcggaggttgcagtgatcgcaaccactgcactccagcctgggcaacagagcgagattccatctcaaaaaaaaaaaaagaaaaaagaaatttaagggccaggcgcggtggctcacgcctgtaatcctagcactttgggaggtcgaggcgggcagatcacaaggtcaggagatagcgaccatcctggctaacacggtgaaaccccatctctactaaaaatacaaaaaattagccgggcgtggtggcaggcacctgtagtcccagctactcaggagactgaggcaggagaatggcgtgaacccaggaagcagagcttgcagtgagccaagatagtgccactgcactcccgcctgggcaaaagagcgagactccatctcaaaaaagaaaaaaaaaaaaatttaagaaacctcaactagaagagaagaatgtgcacatttatgtaagatgtttttatgaaaacgtttatgcacagtgttaccaatagattttaaaagctagggtgttaatgcagaataactttttagaaaaaaaaaaagatgagtagttttcagtcattaatttttatttggattgtctctatgtttgtagttggtagttggcttttattggaatatgcatacattttaaagattaaaatactatattgtatttagctaaatccctttggttagagtatgacagagctctattagcaggtaagaagaaggaagatcatggcacaaaagtctaatagaaaaccttccttattgctgtcagtcttccctctattgagtttcttttttattgagttggacttcatctttgtttagagcttagccaggtggatccctgaggaactcaagttgtgaaggaattaaatgtcaaaatgactttaaaattcctatacctgtttgtatcaaaaatcaaaaactgcttttcatacgcaggctgcatgagtgactctaattatgcaaataataccctcctccattctcccttctccatccacttttgaattatggcatttacaacagaactgttgccagatggatgttatatctgatgtatttcttttcctcctaacatttaaacccatttccagtatgactgccagcagctgagccaacctaaaggtccagagttggggctcaatgcttaatttgttcttagaatatcttggcttgtttttgagaaaatgaagctcacgtgtgtcactgtcactgtcaagggttattaatgacctgtttttttatttttgagatggagtcttgctctgtcattgagcacgctgaattcagctacactgtgaattcactttaactaccagatgttgtatactcagtctcttgcagacctccaacaacaggaagaggaaacctatgcagatgcctgtgatgagttcctggatcccattatgagcacactgatgtgtgaccctgtggtgctgccatcttccagagtcactgtggatagatccaccattgcaagacatttgctcaggtaggccagtcccaaaaacagactcaagagcatatatatatattagtttgctatctttttctcccaggcacctaagacagtactttgcacccaacacataccacatattattgatttactgatatgttggaagacattttggtttcaattgctaggatataaacatttcaaaacaaaacattctgttgagaaatgctaactctaacctcacctcttcctgccttaagaaaataatttctggccgggtgcagtggctcatgcctgtaatcccagcactttgggaggccgaggcaggtggatcacttgaggtcaggagtttgagaccagcctggccaacatggtaaaaccccgtctctactaaaatacaaaaaattagaggggcatggtggtgcgcacatgtagtctgagctactcaggaggctgaggcagaagaattgcttgaacccaggaggcagaggttgcaatgagccgagatcgcaccactgcactccagcctgggctcaggtgatcctcctacctcagcctctggagtaactgggactacaggcatgcactaacacgcccaactaatttttgtattttttgtagagacagggtttcaccatgttgcccaggctggtcttgaactcctgggttcaagcgatccaaccgcctcagcctcccaaagtactgggattacgggtgtgagccactgtgcctggcctgtttttttatttttgcgacagagtctcgctctgtcaccaaggctagagtgcagtggcgcgatctcagctcactgcaagctccgcctcccaggatcaagtgattcttcagcctcagcctcccgaatagctgagactacaggtgagcaccaccacatctggctaatttttgtatttgtaatagagatgaggtttcaccatattggccaggctggtcttaaactcctgatttcaagtgatcctcccacctcagcctcccaaagtgctgggattataggcatgagccacctcacccagcctgctttttctaattcaggttttacactatattcaccatgtggattaactcacgttctgttgctgttgttgtatcagctgtggtaaccatgaactttccccagcctgcctattcttcggacagtctgccccattataactatagaaaagacaggaatgaagcaataaatggtagcttattagctgcttaatgggccccttaactttttttagtccggcattagaaagaaatgagtactgagagactctgcctatttatatatttatttatctatttttttgagacagggtcttgctctgtcaccaggctggagtgcagtggcatgatctcagcttactgtggcctcaccctcccaggctcaagcaaccctcccatctcagcctcaccaagtaactgggaccacaggccatgcaccactgttcctggcttatttatttttgtattttttgtagagaaggggtctctccatgttacccaggccagtctcaaactcctgggctcaagcagtccactcacatcagcctcccaaagtgctgggattacaggcatagccaccttgtttggcctctccatatttaaaattaagttatatcgagccaggcacagtggctcacgtctgtaatcccagcactttgggaggctgaagcaggtggatcacttgagatcaggagttcgagaccagcctggccaacatggtgaaaccccgtctctactaaaaatacaaaaattagccgggagtggtgacacatgcctgttgtaatcccagctatttgggaggctgaggcaggagaatcactggaacctgggaggcagaggttgcagtgagccaagatcacaccaccgcactccagtctgggtgacagagcgagactcgtctcaaaaaaaaaaaaaaaattaagttatatctctacaaaaaattatttttaattagccaagtataatggcacatgcctgtagtcctagctactcaggaggctgaggcagatcgcttgagcacaggaattcaaggctgcactgagttatgatggcagcactgcactcctgcctgggcagcagagcaagacaccgtctctaaataaacagatagatacatgtggtatactttgacccaaagttaaggaaatttttaaatattaaaaagatgaatttttggccaggtgcagtggcttacgcctgtaatcccagcactttgggaggccaaggcaggtggatcaccctgaggtcaggagtttaagaccagcctggtcaacatggtgaaaccccatctctactaaaaatacaaaaattagctgggcatgatagcacgtgcctgtagtcccagctactcgggaggctgaggcaggagaatcccttgatcctgggaggcaaaggttgcagtcagccaagatcacgccactgcaactccagccagggcaacagaacaagactccatctcagaaaaaaaaaaaaaaaagaattttctacctcttggtatttggtattaagcattcactatatcgctcgaaatgtggcccaacaaaaattcataacgtttcttaaaacattacaagaacttatgtataggccaagacagttcttccaatgtggcctgggaagccaaaagattgacatctgtcataaaccttcttatgtttcaagaaaccataatctgcatgtacttgcataacaatcagctgactaaatcaaatgttggtctacaaggctttattccttaacatctcatactgttctaagaatctgtcactataattacaaatagttctttacactgacatgaatgtatagtgtctctgccttagagaaatctaaaggtgacagaagcatagcattttttaagccactgtaattaaatatcatctgaacagcagtgttgagacaaagtttattaagaaatagaggccaggtgggtggctcacgcctgtaatcccagcgcactttgggaggccaaggctggtggatcacttgaggccaggagtttgagagcagcctggccaacatggtgaaactctgtttctactgaaaatacaaaaattagctgagtgtcatggtgcaggcctgtaatcccagctacttgggaggctgaggtcagagaatagctttcacccaggaggcagaggttgcagtgagcagagataacgccactgcactccatcctgggtgccactgcaccagcctgggcgacagggcaagactgtctccaaaaaaaaaaaaaaaagaaagaaagaaatagacaaagtagctacaaaaactcctgaatcatcttgttctcactctttctaaccccaactcggcatttgactcaaagttataatgcactctggcttcattcttaagatgcgacgcccaggtgttctgtttttggcttagaatgttagaacttatggaaataaccctatttccctttctctctttgtcccagtgaccaaacagatccctttaaccgtagtcccctcaccatggaccagatccggccaaacacagaactaaaagaaaaaatccaacggtggcttgcagagaggaaacaacaaaaggagcaacttgaatagatactgtgaactaaccaaaccaaaaccaaccccagagtgcagataaacaattgtttgtggtttctctctttctggttctgttccttttctttcttcttttctttttcttttttttttttttttttactaaattagagaactgctcttgctgaaattatgatagttaagattcctaagaacttgacaatgctcccctggcttgcaggaaattatacttattatagcatcaccaagtttagaaatcatcactaattttcaccctctgttgtctcttcatattcttcttccttttcctaaatgaaattatattatttcaactactaaaacttcccgccaccctgctatttctcttccaattactgttcaaacatttttggtgagtgctgcttttataaatatgtgatgtcacatatttcagtgacagctgatgttatcagaaaaatcctgttatcctgtgtatttactagtcctcatgatctagacttaaccccttttctgtgttacagagtaacttcacataaaagcagatacctttaagtttgtgtagacttctgaataagatgatagacgagaattttttttaaaaaaggaatttaaaggaatcttgtgcaacttctgttgatagctcttaattttgttatacagtctttttaatgaggattggtagggcaatcctaccaattgatgggggtgaggagactgttgggcccttattctcttatgaaaatctgtttctacaaggactaggcctaagtagatttaggcaacgggtatcatatccatgaaaaatgtcattttaagacactaatatcaacagtatatctcagtgtgtgagatatataaatacacatacaccccatgtgcttttttgttggtttagtgtaaactgagtaccactttatattttctcttccatagtgagatgtatgcagtatgtggccatgtttactaacatactcattcttcacaaaattctgagattataaaatgtatatagttaatatttgtttgagcttgtgacctgacttctaagagctacttctaacacagccttaggtcttcaattaacaaagtaggaagttgagcacaaccttgtccacagccattttaaatatccacttagccctgtgtagttggtaggtggacaccactttcataagtgaacttgagctcactactcaattgtgcagcttaatatgctgactagggacattcccctatggattatctttatatcactgtctttctaagcccagagatgtcataagtgacaagaaaagtgataggatcaagaaatgggtgtcactgcttcatttggaacatgttattaactatggtctctttcaaataaatagtagttttatatttcaacacaagttgctataagcagtccttgatgggtttttgattgcatcagctggaaagcctcaaatctaagagggcttcccatcctagatataaaataggtgttgcctattgctgtgcttataaaatgaaaaaggaaattgaggacacttttgcaaatgccagaatgtaagattcattcagtgtgctccctgggcctttatggcatgggttgacaggatttgtttattttctaaaattagcttcattcaatatttatcatcctcctttccctctctgagaatgaactatgtataaaataagcttctgcctatttgcatttatcttccaaacccaatctagtaggatgttctcattttaaaaacgaggggaaaagaccagagtttttcaggagaaaactggaggaaaatgggcacaaaaactcagaaggcagctattcccagcagcttcctagttaacaacccccatgctgcctccagtctttgtctgtattcttctgtatttaaccttcagattgtaagccttttctggcaagcttttcttctttttttaaactcttttcctgaaactttttatgaatggctatggcaccattaatgctgctgaatatctttaaactctgcacaagcaagtgtgtagcttaaggccactactggtaaggaaaccaagtgtcctctgtgccttttttctttctgtgaagtaatttaagaatatccaaaaaaattagactttaaaaagttatcttggtacaacaccgtgtgtatatacacttggaagcttaaaaaggtgttttgtctggaacttagaagcagctctaaatctagtagagcagactttctaacatacctagttttgtgtattggctttgctggagtatgatagcaaaatgaagactcttttactcagctctggtattgctcataacttaccaagaggctaatactaaacttggaaaattgtttaagtatgttttatcaagcagtctgggttttgttttttaatatactttttaatggatatgtgaaaactgaaggaaatgttaaaggttttttaatggtgcaagtgaaggtgccagttgctatttgatatcacactctacaaaagcttcattactttatttgatggtggttgctaagcagccattgcacagagcataagtctactgggtgcctttacatgccagaggctgatgctgcactgttgatgtcatgtgaggaaataatgcacatgctctaactgctcaacaggaaatgaacctagaaacagaaaatgaaaaggttgattgaaataaaacttgatcaacgcgactgtattttgaaacattccaggaaggttacttcttgtcaaacttgcctggcagtgtttgttcaaaacttgtatttaataaatgaacatctgacttacaacctttgttatcactttattccagtattaaaagctagtggcagtttcagaaatccccctgaaaacttagaggattctgacgtttcactttttttttaggtaagtaacatcaaatatgtgtgacctggctgacccagcctgccttaccaggcctctggaggggaccctggggttaccctcaggagatgaatctcacagtatggttttcctaaccagctctcttttggcttcactgtttttctttatctggcctgaaccccaggtctttgtaatcatttgctgttatcttcccctttcttgctccttgtttccatacccctgccatgcaagatgtcagcctagattaactcagccattcccctctgctgtaatatccaaactgcagaccattgttggaggaaaaacacaatttttagaatggtacaaccacaaacttatctctaacgttgcccaacaacccttctgtgtgtccttcagctattccaaactttggcctccttcctcaaattccttctcatacccccctcccattgacccctcacagtccgatgactttgccttcattttgctgggaagataaagacttcagagactttgaagactttcagacctctctcccataatcacatctgtggaaaaggccccatagatccctggctagttctcttttcctgcctcatcagggctcttgtcaatatccctttttatcaggcaggatggcstgygcctgkmrtcscasakctwagswagasrctgaagtrgrakgatctcttgaggccaggagtttcaggccagcctgggcaatgtggcaagaccccatctctaaataaataaatgactgcctcttctctgtcttcaatttctcccctgagttccacatccccctttggttttctgacttgtaatcctttacagccatatttcttcaccattcaccctggattctatcctaattttttgaaaaggcgctagttagttaaagattgccatattgctaaattaactttcccatccttaatttgacttttctgcagtatctagggcagcagaatcactccttcattgaaaagttcttagttccttgattacacttctaatttttctttccatctctctaaccattccaaaaatcggagatttacttctgctcagacttccccaggttacattacttatagttctgttcctctcatcaaatgccacttccctacatacatcttttcctcctcatattaaactatgaagtttcagccctctgtagtatacagctgttctcttacacatcggctcaaggatcttttctaggaagtatgctgaaatcagcaccatgcctaatctgatggaatgccccctctctgagtatacattgcaacttcagatctcaactctgccacttccaaactgtgtggccatttttcaagcccagtctcaatggggacaatgccttacaggctttctttaaattccaaaatgcctggcatagtgtgggcgttcaatacaggtgattttttcctcacatctgcacagctccttgtggttaactagggaattaggggaaatggattccaatcgtgatacagcactttggggagattgggattacaaaaaatcaactttaaaagggctatggggccaggcgcggtgattcacgcctgtaatcccagcaccaaggcgggtggatcacttgaagctaggagttcgagaccagcctggccaacatggtgaaacaccgtctctactaaaagtacaaaaattagccaggcgtggtggcgggcgcctgtagtcccatctactagggagactgaggcacaacaatcgctggaacccgggggacagaggttgcagtgagccgaagtcgtgccactgcacttcagcctgggcgacagagcgagactgtctcaaataaaaagggctatgggttgagcctggtgacagcctgtgtggtgattgctcggcccctaactttatatgtttggccttggaccctctctacctctgtacaacgatcgtgttggactagaagaatctcagcgaatccttctccagtactgacttcaaaggttctcagaatcgcggcgaaagcaccctacgcaaaatagcggaggtcggcgccaagaaaagcactgcaggttcagggcgcatgcgcatttccgctccttgccggttttccggacctctacgagtggctgccccacaaaatgcctgcttctctgcggaatcctactgttcttcacatgctctctaataccatcttttcatatccactttctcttccatgttgaaaaattaaattgacaggctggattctgcaaagatctttggacatttaagtatcttcgaccggcgcgaaaagaggcggcctgaccttggaagtgggacggggtcctgcagcgggtccttccggcgggtgacattcagccggcggttcggggcgacggactctccattccagaaccatggcccaatttgtccgtaaccttgtggagaagaccccggcgctggtgaacggtgagcgcgatgtgagaccgccgaggcgggcacacgggcggcagggaggcctgcgatggcctgagaggaagaagcgggctgcgaagacccgaggggcctgcgggtgccggggcgggatggcctgcaggtggagggagcaggaagcaggttggcgactcttttctagccttccactcgtctgacctgcagattgggttctctacacaacctagaagttcctgaattctaaccacgactgggaagagaggtagtgtgaaggaagcccggcgttgcccggcagctgcaaccattacgccccctgagatcgctaagagcagggatctagaggggatggttctgttaggagagctaagaaaaggaagggcagaaacgtgaaagtaaatcaattcggcctcattacatgtggtgttgttctcagtggagtatttggaagtcaacagaaatgtttaaggatgggtgagcttttttgaacgttgactttgctttctgtcctagacggattctaagatacttccgctttaatccgagggaaattttaggtggaaatggacttcatggatgagtatccatgccccgagaagcataggacgggatccgtataaacaataatctttgttacgaagctt

SEQ ID NO: 8 - DNA, 246960 bp, Homo sapiens
gaattcccgttatttttccaataaatttccttttgcttaagttagatcgagttggtttctgatgcctataattaaagaatggtttattttccaatctcctagcattgagaggcattttacaaaagtgtggtaccaacaaaagctcaacatcacccaactagctgcatttacactgactgcttcctcttattttccaaaccttaatttccaagagggaaaaaaaacctatggttaaaggccgggcgcggtggctcacgcctgtaatcccaacactttgggaggccgaggtgggcagaccatgaggtcaggagatggagaccatcctggctaacatggtgaaaccccgtctctactaaaaaaatacaaaaaaattagccgggcgtggtggcaggcgcctgcagtcccagccacttgggaggctgaggtaggggaatggcgtgaacccaggaggcagaacttgcagtgagccaagattgcaccactgcactccagcctgggcgacagagcgagactctgtctcaaaacaaaataaaacaaaacaaaaaaacaacctatggttactccagacgaggtagcaatgattgttacaaatgtcccctgcttaacaggaaaaaaaaaaagggagatggtaatttctaattatatctctaatttaggctggggatggtggctcacacctgtaatctcaaccctctgcaaggctgaggcaggagaactgcttgaggccaggagttcaagaccagccagtgtgacaaactgagactctgtctccccgaccccacccaaaaagaaaacaaaacaaaacacacaccaaaaaaaaaaacaaaacaaacaaacaaaaaaaacctttgagtttttaggaaatatttttttcaatcatgataaaccgattgttagcaggaagaatgacttatttacaggattcagaatgctataattcctaactataaatagtaaactattaatcctcattagaccttagctgacctggcacaaaattttgttgccaacagtacggagcttccatgtttccctcaataatcaactacttctcatttcttcaccttcttagagtttcgaaaaagtcttcaagaggtgttcccagggtttagaagcaacgagagaggccatctttctcaatcataaccccaaagttaatataaagtttcaaataatgctaagcagacaaaaacagtatattcttaagccttccaaagaagtctaggttcctataaagctatacctttagaatggcaattattctactggccacagcatccagacctagaactggtcacagatggctctagaaatacgttgtgggagcaatctgtagtatatctggttccagcctgtcaatgtaaaagctcttttgagagcatataattttaagtgcctaattctctaacagtcttttttttttttttttttttgtgagacagggtcttgctctgttgcccaggatggagtgcagtgacacaatcctggctcacttacagcctcaacctcctgaacatctaagactacatgtcccccatgcccagctaatttttgtacagtcagggttttgtcatgttgtttaggctggttttgaacccctggactcaagcaatccacccaccttggcttcccaaagtgctgggattataggcatgagccactgcacccagccaattctccaaatctcacagccaaactgcaactaaattccatctcaaacaaatattcaaatgcagaagactcacccatctaatcaaggcagttttaatatttaggggaaaaaaaatgcctggataaaactgtaaaaccaagcatgatagaagagatacttttaggaatgggggagggatgacaaaaataaaacgagaaggtagataagaatggaaagaatactagaagacagcctgccatgaggttatattttaccaggggggtgatgggtgcacccaaatctcagaaatagcaactaaataatttacttggccaggcgtggtggctcacgcctgtaattccagtactttgggaggccgaggagagtggatcgcctgaggtcaggagttcaagaccaacctggacaacatggtgaaaccccgtctccaccagaaatacaaaaatcagccgggtatgctggtgcccgcctgtaatcccaagtcacttgggaggccgaggcacgagaatcgcttgaacccgggaggcagaggttgcagtaagccgagagcacaccattgcactccagcctgagcgacagagcaaaaccctgtctcaaaaacaaaagaatttactcatgtaaccaaacaccacctgttcccccaaaaaacctatgaaaataaaaatttaaaaaatttttttactaggggatctgtaaattttgtttcggttctaaaatcctaatatttgtgacttgtaactctgattgattctaagaaacacataatcttgtgctttccatggatccccaggacaaaacaataggaaagaaaaaggcaataaaaaaaaagaaaaaggcaatacaagtggtgaccttgagtatctaaaacaatatactcatacaataccttgctatttcaaaatactttggttgtacactacatttgatcttaacaataaaaatcctgtgagggagagtacttatttctactttacagaaaaagctggatgtcagattggttaagtggctgaagagttaattgcctatatgctataacaacactcagagtacaagtaacaaagttaattttaaattttaatacaaggtaagaaataggagtcagcaaatatccactaagaatgaggactgggctaagtgcagtggttcacatctataattctagcacattgggaagccaaggcaggaggactgcttgagcccaggaggtcaagaccagcctggtcaacatggcaaaaccttgactctaccaaaaacaaaaacaaaaacaaaaacaaaaaacaaccaggtgtgctggtactacactatcatccttactcaggaggctggggcaggagtatcacgtgagcccaggagtttgaggctgcagtgagctaagattctgacactgcatccagcccaggcaacttagcaagactcagtctctttaaaacaaatttaaaacaattacgtctcctaaattaactaatttccttttttgaaactattatataaaataacccataacatttttgagcatttatcacgtactaggcattgtactaagcatgtgaattatctcacttaatctttacaacaaccctatggtattatactattacctcaattatataggtcaggagtctaagacttatagatcccaaataaccaatttatgaaggagtagagctgggatttaatctgggcagttccctacaccaagttcacctgcagacatgagttacctaagtttcatcaaagcacgctaaataagcacaggcactatgctaagtactagagataaaagttgaatgatgcagttcctactgtaaaggaactctcataagacctcagtgggccaggtgtgttggctcacgtctgtaatcccaacactttgggagactgaagcaggcagatcacaaggtcaggagatcgagaccatcctggctaacatggtgaaaccccatctctactaaaacacaaaaaattagccgggtgctgtggtgcacgcctgtagtccccgctattcgggaggctgaggcaggggaatcgcgtgaacccaggagtcggagattgcagtgagtggacatcgcgccactgcactccagcctggcaacagagtaaggctctgtctcaaaaaaaaaaaaaagaaagaaaaaaaaagacttcagtgtagataaaatggcttaacatgaactacatcatagtagattcctaggtatttctaatacctacacccaaattacccctctgatgatgcatatccttgttttgatactttatccagccaaaagcacactctcaactctgggcaatcattacccagcgttctctgcttggaacacagctcaattcttccaggttgtcccatcttcctctaatgactacatacatacgcaattccaactagaaaggtactcatcatattacagtgaattacctgtacaattagctgtcctttccagactgtaagacagcaaccatatatctgtcttattcattatagaattcccaaggtcaaacactttctaggtcactccacacatgttggctcaatgaaaaagtactcagtgatgtcacagggtttgtccttagcacagcctgaattcaatcatttcatcaatttaagtatgtctgttgtcatcatttatcaaactggcctatgtataatgcatgtttatatgtacgtgtatatttatgtgtatgtgtgtgtggatatgtatatacatgcatttatttccttgctctttccactgaaaggaccaagtagcaaacagggtacctaatgcctgggtcttggtccctaatactactccacactaaaaagaatcaaggatccttggatgccaatgctgggccaggataggtataagataagcctgcatcatgatatgtcaaaaagcaagaaaggggccgggtacgatggctcacatctataatcccagcactttgggaagccaaagtgggcgatcatttgaggtcaggagttcaagaccagcctggtctacagggtgaaaccctgtctctactaaaaatgcaaaaattagttaggtgtggtagcacacatctgtaattccagctactggggaggctgagacacaagaactgcttgaacccaggatgggaaggctgcggtgagccaagatcatgccactgcactccagcctctctgacagagctagactccatctcaaaaaagagaaaaaaaaaaaaaaaaaccaagaaagtactcaagaaaaatgaaggggacacatcataaaaacataggaaccaggctgaaagagcttacattggccagatctaggctatttttagaataataataaaaaaaaaattgaaaaaaattgaaaaaaatggtgagtataagtccatactgataacagatatatatggatgaggggaagggaagtttcttctttataggggcaaatacagagggagtgctagaattggaaagtcatcataacccatcagagcagagatgagatcaagcaagaatcaccaatgggtgctaaaactaggggggaaattttgttatttttttaaaaaagtatcatgccatgaattgcaaatcacaagatacgaagttaaatcccacctctaccactcatgagctacaagtatctttggctaagtcaagtttctcaagctcagcactactgacattttgggccacaaaattctttgttgtaaggggctgtcctttagcatccccccattgatgataataaaaaatgtttctacaaattgctaaatgtcccctgggggacaaaaatcctccctggttgaaaacaatacgctaagagaactgctctgaacttttgttttctcatccacaaaacggggataatacctagcctgaacatctatcttactgggttggaggaggagggtggccatagtattattgtatttgtatggtcttaaaatgcaccccagattgcttattcgtctcaagggagaggggaaagagcagtaattatagaagggaaaaaccacacaacatcttgacagggtaatcaaaattaacatcaccaaagaggaataaatggacactaggcacaccttcaaacatgataccctgagaaggccataatgtgatttctgcattattcgggctgagaaagcctaccttgaatctaattacttgggaatatcacaaaatcccaaaacgggaaatgtactattaataaaaaaagggggccaggcatggtggctaatgtctgtaatcctagcactatggcgaacccaggagttttaatcagcctggataacatagcaaaatcctatccctacaaaaaaatagaaaaattagccgggtgttgtggcacatgcctgtagtcccagctactaggaggctgacgcaggaggatcacttgagcccatgaggtcaaggctgcagtgagccgagatcaggccactgaactccagcctgggtgacagggcaagacccagttgccaaaaaaaaaaaaaaaaaagagggatgggggaaggggttgtaggctgtatttttaatatgctgatgtcataaaaagaagaacaaacactagggaaacgctaatgactaaaaaagacataattacaaataatacctgaccctagactggatcctgtatagaagaaaaaaactgctataaaggacatgtttgggtccattaataattagaatgacagatgagatagaagtattttatcaatgttaactgaaggtaactgtactgtggttacgtaagagaatatcctaaagaaatacacaccgaaatatttagagttgtaaaagccatgattttctaatttacccttaaaaatttcagaaaaagtgtgtatacgtgagagagaaatgttagttcactgtatcacttctgcagagcaaaaagaaaactgtttaatggttgacacataaccttacatatgtgataaaaagggttaacatacctgaataggagatggcttttcccagcccatttcaaaaattcccatcagtaactcccgtttcaaacagtaatcttcaaactcatttccttttgtggaggtcacatcctagtcaaacaaaaaggaacaataaaagaataaataacactgttggtaaatttggtgtcctttggtaaatttatctgtgtttaagaaaatttatctgggccaggcatggtggctcatgcctgtaatcccagcactttgggaggccaaggcgggcagatcacctgaggtcagaagttcaagaccagcctagccaacatggtgaaactccaactccacgaaaaatacaaaaaattagccagggtggtggtgcacgcctgtagtcgcagctacttgggaggctgaggcaggagaatcgcttgaacccaggagacggaggttgcagtgaggtgagatcgcactcactgcacagcctggggggacagagccagactctatctcaaaaaaaaaaaaaaaaaaaaaaaaaaaggaaagaaaacttctctgactttagtactttacctgcccaatcttaaatataaatatatgcagattacttgttttaatctgtatttcaacttttcctgaagaaaaaccactgtccctgctttgacacacaagctttttaaaaaactatgttttggggaaagagcacttggtcatagccttctttttttcttcgagagatggagtctcgctctgtcacccaggctgcagtgcagtggcgtgatctcggctcactgcaacctctgcctcccaagttcaagtaattctcctgtctcagcctcctgagcagctggattacaggcgcacgccaccacacccgactaatttttgtatttttagtagagacagggtttcaacatgttggccaggctggtcttgaactcctgacctcaggtgatccgcctgcctcggcctcccaaagtgctgggaatacaggcaagagccactgtgcccggcccttggtcacagtctcctaaggactggtggaatagtgttatttttttacacaaatatcatgccatgaattgcaaatcacaagatatgaagttaaatcccacctctaccactcatgagctacaaatatctttggctaagtcaaatttctcaagctcagcactactgacactttgggccacaaaattctttgttgtaaagggctgtcctttagcttcccccctattgatgataagcaaaaatgtttctacaaattgctaaatgcccccgggagacaaaaattctcccggttgaaaacaataggctaagagaactaactgctgagcatttgttttctcatccacaaaatgggaatatatagcctgaatatctatcttactgggttggaggaggagggtggcagtggtgttatggtcctgaaaccaattccctccagataccgagggacagctatacctcacttctagttccccaccattattctacttgtattttacaaccaacttaccgaagttttgattcttagatcctttggagggagttttaaagtctttttccagtcatcaccaggtctagagagaatacagtaaacttgaagtatcaaaattcatagcatcctaacaaagatgattcatctcaattataattaagtgttaaaaaagcacagtaagtttaatatattccatttaatatatctaacaagataattaaacaactttagaaaaagtgttcttatagagaatctcaggaggataaaaaaatcaagaacagaagggattaaggcatccatcctcttaagcaatattgtatacagtgtaactgttgtcaaaaggtgttttgtttgacctacacagcatgtgttttaatttaaatgagtttaaattagttctcaacatttaaaaactgtaagattttatatatcttatataactcctgggctcaagaaatccacctgcctcggcctcccaaagtgataggattataggtgtgagccaccatggccggctattctcatttttaaaataggttaacaggccaggcgtggtggctcccatcagtaatcccagcactttgggaggccaaggtgggcggatcacttgaggtcaggagttcgagaccagcctggccaatatggtgaaaccccacctctactgaaaatacaaaaattagccaggcatggtgggacacaactgtagtcccagctactcgggaggctgaggcaggggaatcacttgaacctgggaggcggacactgcagtgagccaagctcacgacactgcactccagcctgagtgacagagggagactctgtctcaaaaataaataaggtgggcgcacacctgtaatcccaacactttgggaggccaaggcaagcggatcacctgaggtcaggagttcgagagtagcctggccaatacggtgaaacccactctctaccaaaaatacaaaaattagccagccatggtggcatgtgcctgtaatcccagctactcaagaggctgaggcaggagaattgcttgaacccgggagccaagatcctgcgccagagcaaggctccgttccaaataaataaataaaacaaaataggttaacagttacatcaaacaattgatataatgcactcagcacagtgcctggcaaaataatagcacagtattagccaatgagcatctcttaatctttcttttttattggaaatgctagaaatcatgaaagagaataaaaacaaggagaatataaataaactctctttttggccaggtaaaaacctcaagtaataaatactcaaagcatctttaaaaaaaaaaaaaagatcagggaacatctgcagacaaagtatttaactgtgacatcttcgaaaaagttttcactgcagctgttcttacataaccagagtccccaaaacatctcaaatgctccattcacagacaaaaagaccacttattttacttaaaactaggtcctacataatgcatactctaacattggtaactttttgctaccaattccaagactactactgtactaaagccttttttttttttttctgagatggagtcttgctatgtcacccaggctagagtgcagtggcatgatctcggcttactgcaacctccacctcccggggttcaagcaattctcctgcctcagcctccagagcagctgggattacaggagcttgccactacacctggctagtttttgtatttttagtagagacggggattcagctggtctcaaactcctgacctcgtgatcctcctgccttggcctcccaaagtgctgggattacaggcgtgagccacctcacccggcctactaaagcctttcatctaagcctgtatcatcgaagtttctgatgtcagtttgacataccgttgaattcaacaaaatagtgaataataatgcgtaagatacaatgcaaaacctgaccacaagaaatttataatcttatgagatgaaaaaactatttaaaatgagaaagtaagtgacggaggttaagtattagaagtgttctgagacacttgatgggatctagaggacttcatggaagagagggcagagaaaatgagatttgaagaaccgcagaactgaaaagaaaccattaatcgtaggaaaaccagaaaagaaaaatcaaaatccactgttgtccccaaatcagaatttattttttatttctttgagatggggtcttaccctgtcacccaggcttgagtgcagtggtgcgatcatagctcactgcagcctttattatttgtagagacagggtcttgctatgttgcccaggttagtctcaaactcctggcctcaagtgatcttcccacctcagcctcccaaagtgatgggatgaacggcatgagccatcatatccagccccagaattttttaaatagaaaatattctcataggccaggtgcagtggctcacgcctgtaatcccagcactctgggaggccgaggcaggcagatcacctgaggtcaggaattcaagcctagcctgcaaacatgatgaaatctcatctctactaaaaatacaaaaattagccagacgtgatggtggacacctgtaatcccagctacttgggaggcagaggcaggagaatggcttgaactgaacccaggaggtgcaggttgcagtgagtcgagatcacaccattgcactctagcctgggcaacagagtgagtgagagtccatctcaaaaaaaaaaaaaattaaaaataggctgggcgcagtggctcacatgtgtaatcccagcactgtgagaggtcgaggtgggcagatcacttgagctcaggagttccagaccagcctgggcaacatgacaaaacgccgtcgctactggtgcatgccagtagtccccactatttgtagggctgaggcaggaggatcacttgagcctgggaagttgaggctgcagtgagccatgatcgtgccaccatactccagcctaggcaacaaagtgagaccctgtctcaaaaaaaaaaaaaaaagttataaaaaaaattaaaaatagtctaaattttgctaacctacttacattctgccaagacaaactacaactgaagtagtattcatttctataccaattaaagcattcaccttaaaaataacagaatatacactaataccaattctcccaatgacctaaccaattctgctgaaaattagttcttagaggtcctagtgaaccacatacggtaactatatgacagtctggtagcttgtataagctatttttctgtaggaagtgaaaagatctaggttgtaataaaacatatacctcagttcagtaacccagtgtcaacatcttataaagattcccagggttaaattattttatatggcaagtttttttttttttttgagatggagtatttctctgttgcccaggctggagtgcagtgacacgatcttggctctctgcaacctccacctctcgggttcaagtgattctcccgcctcagcctcctgagtagctgggattacaggcgcatgccatcacacccagctgatttttgtatttttagtaaagacagggtttcaccatgttggtcaggctggcctcaaacttttgacctcgtgatctacctgcctcagcctcccaaagtgctgggattaaaggcgtgagctaccgcacctggccttttttttttttgagatggagtttcgctcttgttgcccaagctggagtgcaatggtgcaatctcggctcactgcaactccgcctcccgggtttaagtgattctcctgcctcagcctcccaagtagcattatgggcatgtgccaccacgcccagctaattttgtacttttagtagagacggggtttatttttagtagagacaaggtttctccatgtttgtcaggctggtctcgaactcccgacctcaggtgatccgcccaccttggcctcccaatgtgcttggactacaggcgtgtgccactgcacccggacctatatggcaagttcttaacaaaagccaaacatcaactggagtcaagaatcttaaatgttaatttcctataactgaatctttaaagtgatggttaccattcaaatattgtaatttaaactatgcacttaaaagtaacaaatagcctacatactttcagctttaaaagaaaaaatatcctctagtaagaggaggctcttcaattttaaggttaacaaaaggtttctgagactgttcagaactgtgttctgtgagttcaaaattcttagttccctttttatatgtaaaaggaggaaaaaaattaaaaattttttttttgggtagagacagagtctcattatgttgcctaggctggtctcaaactcctggactcaagtgatcctcccacattggcctccccaaagtacagggattacaggcatgagtcacctcaaccagccaacttttttttttttttaaagtaaaaaagctaagttccataagctaaaaaaagttacgagaaaattttctgagtgaataatgcttggagttcagaaggctgggcaagtctttaaagactctaaagactcagactgagtctttaaatttaatacataaagttggctttatctgctgtttaactagggtaaggtgcagtcgtaaaaaaactatactgacaaaaacgagatgactaataattttattcatttacaacaaactaagctaataacttttacactaattatgaaagccagaaatgtttccaaaaaccatttatacaaaatttgtgtgtatcatctgacctcaggatgactacttgctgaacaaattatggcagaaatatattattctattgcaaatacctactggccataaaacaaagtcatctgtcctctatttggaatcaaaatggttaaattaaggcataagtattaatagtcaacaccaaagtaacacaaatcttggttccccacaagtgtttattaataatttactctaacacttacttaatagtggtggtcatactctgtgcttgctgctgagtgccattattgattgtgttggtgtttttcagctggttcatctgttgctgtgtctgtgtgccccctcctccagggccaccagtgggtttcacagggcctctcagctgaccattttgactggacagacccattataacagggttctctgttctggccgtgctcatgctgttttaattgcaaaggtctttcaaacttcaaaacttttgaaagtcagtagagaaactgtaataacagtttattaggctctccaaaatgaagagataaatataagtcttgctcaataaatgagtcctttattgcaatgcaggcaagcacctgtaagtctctgaacggtaagcagcagtaacttgctctcttgcacggaatcaactttttatttttaaaaagccctctaacaagcttgagttatatctgaattcactcacgtcaatctgaaacaaacaaacaaaattaaattagcaaacacaacagaaaaactttgtttcccttttaaaagaacccctttaaaagaattctcatcttttatattaaagaattaataatacagctacacttagaccaaatcacgagccaagctaggatagacacaactttgaactatctcaaaaacacaatgaggccaatatcaaacatttaaaattgttaattcaaagcaatccagagattaagtagaaagagactagtaaattagcactactcgtcaatgataatctcttctcttcagtttcctccccatgaattctctaagtctctgacatctctaaaagtcagtgattcattatacttaattgcattacaactcactgaagtatcacacaatttaaacaagacaattcattaattttcttctacttgtaatagcaaccgagagtccttatagatttaagtgagcttttgacttgaacttcacacttccagaaaaaaacacctttgtgcccttacaaatttcaactattaaactttatgggctgggtgctggtggctcaggcctgtaatcgcagcactttgagaggccaatgcgggcgatctcttgaggtcaggagttagagaccagcctggacaacatagcgaaaccccatctctactaaaaatacaaaatttaggccgggtgcagtggctcatgcctgtaatcccagcactttaggaggccgaggaaggtggatcatgaggtcaggagttcaggatcagcctggccaagatggtgaaaccctgtctctactaaaaatacaaaaattagccaggcgtggtggcgagcgcctgtaattccagctacttgggaggctgaggcagagaactgcttgaacccaggaggcggaggttgcagtgagccaagattgtgccactgcactccagcctcagcgacagagccagactccgtctcaaaaacaaaaacaaacragaaaaaaaaaacaaaaaacaaaatttagccgggcatggtggtgcacacctgtaatggagtcccagctacttgggaggctgaagcacgagaatcgcttgaacctggcagacggaggctgcagtgagccaggtgacagagaccttgtctcaaaaaacaacaaaaaactttaagaagaaaaatgtattttcttttttcctttttgtcctttaaaacaataaatgaagcagtcaagagaatagtgtatttctgccataatgcatccagcaagtaatgatcccaaggacggatgatatacacaaattttgtataaatgaatttttattttgaaattgacaaaaccaagatgactctaataattttattcatttataacaaacttagctaataactattctaattttaaatttaaaaaaacaggaaaattcctgtttaaaaaaaaatccgcggaagactaaacacactagtaattttaagaaaactttccaagaaatccagagtagtaaagctaattaatagtttaaaaaaaaaaaaaagaactggtaggaggggcacggtagctcacgcctgtaatcccaacactttgggaggccaagactggtggatcacctgaggtcaggagttcaagaccacctgaccaacacggtgaaactccgttccactaaaatacaaaaattaactgggcgtggtggccctgtaatctcagctacttaggaggctgaggcagcagaatcacttgaacccaggaggtggaggctgcagtgagtccagatcatgccattgtactccagcctgggcaacaagagcaatactctgacttaaaaacaaacaaagcaaacaaacaaacaaaacccacaaaactagtcmacctcagtttaaaattatcccgtaaatggaaatcttacttacttttattttttattgtattttttgagacagaatcttgcactgtcacccaggctggagtgcaatggcgcgctctcagctcactgcaagctccgcctcctgggttcacgccattctcctgcctcagcctcctgagtagctgggattacgggcatgcgccaccatgcccagctaatttttgtatttttagtaaagacggggtttcgacatgttggccaggctggtcttgaacaactgagctcaggtgatccgcccgcctcggcctcccaaagtgctgggattacagacgtaagccaccacgcccggcctattatttttgagacagagtctcactctgttgcccagagtggagtgcagtagcccgatctcagctcactgcaacctccaccacgcaggttcaagcgatcctcatgccttagcctcccaagtagcttggtgggattacaggtctggctaatttctgtatttttcagtagacacggggtgttatcaagttggccaggctggtcttggactcctaacctcaaatgatctgcccgccttagcctcctaaagtgctaggattacaggcgagagccaccgtgcccggctgaaatcttacttttaattgkagttaataaaaacatacaaagacacgaaaacaaagccctactctgttggcttttgatttaaccccgttacactttttttttttttttttttttgaggcggagtctcgctctgccgcccaggttggagtgcagtggcacaatcttggctcactgcaaccgccgcctcctgggttcaagcgattcccctgtctcagcctcccgagtagctgggattacaggcgcctgccaccacgcgcagctaaattttttctatttttagtagagacggggttttgccatgttggccaggctagtatcgaactcctgacctcagctgatccgcctgtcttggcctcccaaagtgctgggattacaggtgtgagccaccgctcccagcaaccccgttacatttcttatataaaatacactagcttacgagtgctgattctttctgccatacaccaaggcatgtgaaactcaaaattttaaagtcaacagatctcaacatttatgaagaaaatgctccttgattatgccttccttaaaaaaaaaatgaacaagttgctcacaagcaaatcctgattatcacatacacaaagctgtttacttcagactctgacctcttaagcagatatggttaacagctactttcctgtattgacggttttatattatgatcagcgatatcacgcagttcacagagacttagctgtttgcagagcactaagaggatgaaaagggcaacctctaaagaccgaacgatatcatcattactgtccatcatgcacagtaagacctcctatatccttaaatccaaaatgagactatgtgataactgctcccttcttaaactgaaacctgcactgcagctttttctcagagaaggaaatattcctcctaccccttcccaatttagatttgcaagttttctacattttcaaaaacaaaaaacaaaaaaacaaaaaacaaacaacaagaaacgtagactagttgggaggagcccctagcggagttaattacagcacttcacagatcgtagttagcaattgacagtttcacacccaaaacagtatcgtcatcgccaacaagagcttttgtttgcaaatgcagcgcagtttttctagctttgcctgcaagttggagtgactgggttttattctgaagggaaatgggggctgaggaagagaaaggagagagatacgggaaagagtcattgactaatgactggaaccccgtaactgaaaggaaatttcttgtccccccgcaccccgccccacgccccaaacacacacacttctgaccataaacacaaaaggttggggctctgcaatcttatctgcgcaatatgagccagcaaccgctccattagtagcaaacaatagggactcccccaaggaggccccaaatggaccccctaaaccagaaatccccctcctttcctccaagagtcgggggctccataaataccctcttgttattgacccgcaaggcctactgcaatcaagcagcggccggtttgcttctaaaccgagccctccaatacagcatgtccctgccgccccctatagggccgcctcgtaccctataacctccaccatcatccccctaagtccttgccgcccccttcggcctcatattccctcatcttcgataaagctactccgagtacttagcctgttcctcctgccgaccctgctgcgcaccacattcctatattcgcctcctctcaggcgctcccaccccacacagctgccgaccgccttcctccccaggcccggccaggccttaggcctccgcccgagagtcccccagagccggcccggggggctccccacagcccccaaagcaccgctgacctcgaccccaccacctcaccccaagcctcgcgactcgggcccgtgtcctaccaacgaggccactcccgctcggcaccctcggtcctttattgttgactcgaagctcccaaaatggcggacgctccttcctcctcggaaacctccgcccgcccccacccagccctctcgctacggcctcctctcgcccccgcccccgccccgctccgaggggcgcgcaggccagccgcccgagccgccggctcccccggctgtccagccctacctcctccgctgcccgctctcgtggcgccgccgaagtcgccgcctggctgagctaactcggctcctctgccccctccctcgctcgcccgttcgcccgcccgccgcctcctccctctttccctgcctctccgcatggcggcgaccgcggctcctcctccactcaagatggcgaaacctcggccgccgcggctatattcgccgcggcgtcactgccttcctggcctggtggtgagaggaagtcgggccgcgaaagcttcctgaggagaaaatggagggcccttctctcacaccgacgagaaaagttcgagggggaaatacgagttcctttctgaagggacaggacggctgcttttccacagccgcgacgtgattgagaaatggtggctggcaagggtaggcctgccttcgcccctccaaagtaaaaatcgggagttgagaccagaggaacatctctttattacatgactaaggatatgttttgaaaactggcccccgggcagctgctcggggacaggaagctgacctgacttctccagctggccggggaggctgatgccgggcctaaggggccgcgtccgagcctctcggggcgcgcctccatgcaggaaggcgcggaactagcgacccggagacgccgggcgcgcgtctgagtgtgggggcaggaaggggggccgaccgggcccggaggccgcaccaggcaggagggaggactccagagagtgcgcggggggcgctgcgcggtgggacggggcgagcctgtagggcgcgcctggcggcgggtaggctccgggcttgagggtgcgcctgggggcgctggttgtgggggaaggcaccgggcttgagggtgcacctgggcgggggaagtcttcgggcatgagggcgcgcctgcgggtggtatgggggggtacaccgagcttgagggtgcgcccggggggctctcatgtgaagggtaccaggcttgagggcgcccctgcggggggcgcagaggcaccgagcttgagggtgcgcctcgggggtctgcggggggaaggcaccggacttgagcgtgcgccgggagaggacggcgggggaccggactgtgagggcgtatcttgggggacctgtctaggaggaaccgggaggtgaaggcacaactgggggtgaggcgggggcaggggccgggctgtgagagtgcgactgaggggggattactccggagagcacggagctgggggcgttgcgcaggtggagtggggaggcctggtggagagggtagcaaaccgagagagcgcaccggggtggtggggggagaagctggactgtaaggtgaagagttagtagggcgcaaccgtcttctcctgccctcgaagggcaagactgaagaaagtaggggcggaggaggccgggccctccactaaagggagggaagctagtgaagcgtcagttataatagaaataggaattcagtaaggaaatggagaagcttaaggcaaagggtgactctccggcctgaccctcactatgaagatatttatgtatgttcccataatacttttcagatcccaatgtctgtgtttatccttgacagaaataatagaactgctgtcttcttccaagttaaacaaaactttggagctaaaagctagctaggtcaagagaaacaaaatctaatcctcacccaattgagagactgaatatacaaagaatggccaaacctaaccatgacctcctacccataacctcttcagtaatcggccagaagggtcaggacttaatctttaaccggcagcttccctatttcttgcccctgcttccagctctgggccaatcagagaaagccaaatgtgctcctcacaccaatcgcgtaagaagccctgcttctagtatagccctcctccaacttcccgatgccaacatcctccaatcagagccaacctgaagtttctcccttttttcagtatatgtaaagcttttccactcccctgcctgcctatgagtctgttaaatcaagtgatgggtcgcggctgactcttgccagctctgagtaaatagcctattctcatttggtggtcgttatttctacacagccggtgggaaggtggtggagaatagtgaagactattcttaaggttaaaaagaaggttcggcttacattttttttttattttaaatttacagcatggcgtctccagcccaggttttaaaataccttctaatgtaaggaaatagccctgcaccttgtgcccatcctagagagaaaatggtttcttaataaaaaatgtatgaggccttttttgccccaatatcttcccaagcagaggaatgtgaaggggggttgggccaagaagtgagtggtaggaagagaggcctacggatttaaaacaggccactgcttggaggggtgtctttcctaaaccactgaagaaattgaaccaggcaaaggaagggggttcacacccacaaataaactataacctacaaaaggagcccgggttcacatccacaaataaattgtaacctacacaaggagtctggttgaggtcacaaaacaaaagccaggaggcaaccaaaagtagaatatgaaataggtgctgccttctcacctaggaatccttccagggctaaaaccttcaaatattctgcttttaaggtagtcagataccctcacaactcatttacatcagcccttctctgttttcaagtgagaagcatagatggtttagaattaagctatgaactcttggatcttttcttccaagtttagtgttagtggtagataggtctagtccaactatctcaatacattgttttctccctagttaaaacagatttgcaagaatcatttgtatgacactttaggaatacagataaattgctagtgcaaataatatccttatatttataaaatatatgtgtacttttaaaaaagttatatgaatccaatcctctggccttttagttagtattgagtgtgatagttgtgggagatctgtagtaaatacggtttctgaagggtgtgctatcatccctaatgaactcacctattaattgtggtaaagagtttttcacttgggctgggcacggtggctcacgcctgtaatcccagcactttgggaggccgaggcaggtgggtcgactgaggtcaggagttccagaccagcctagccaacatggtgaaaccccgtctgtactaaaaaaaaaaaaaagaaaaaaaatagctgggcatggtggcaggtgcctgtaatcccagctacttgggaggctgaggcaggagaatcccttgaacctggggaggcggaggttgcagtgagccaagatcgtgccattgcactccagcctgggcaacaagagcaaaactccgtctcaaaaaaaaaaaaaaaaagaaaaagaaaaagaaatgaaaaaaaaagtttcccaacatgtattagccgttttcatgttgtctgtattcacctttgcgtcatcacccctcttcaatttcctcctggaattcaatcacagtaatgggttatctcagcatatattattcgccagtctcacatcctgacctcatttatttacctaaaaataaccagaacgaaaaaaaaatcacagattaatttacacttgatttcactttaacttcaatttaaaatacttagaatccagaattcctagtaagttgaacctggaatacgcagacctgtgataatatcttaaacactcaaatgttttcaacttgctgaaatggagttcacacttttaacattctgggctttttttttaaaagggactataatactttaactcaaattacaatcaaatgtgttcattacctataagaaaaaaattttacctatctcatatcttcagtgaaatgattatatcacatctggctaagctttaccatttggtatttgccctctttcaagtgatttgcagtataatactttgatttcccaaaatttcaacatacaaagttattttccaaatatgctcaagcaacatctgatcatcactaacaagactaaaggctaatatgcccaaggagccaagtcccgttttcttgggacttcatagcaggtaaaaattgccttttcaatttatacacctgaagaaagtgaagcagcatcagtcactgagggcttagtagagatgtcctcagagaggtgcacatactgcgctgaagttgatgcatactaagcaggcgtgcttaatcactgagaggttacatcaggcacattttgttggaataaatgttccaacccctgagtaaactcaaattgaaaagtaggaaagttggccagcgcggtggctcacacctgtaatcccagcactttgggaggccaaggtgggcggatcacgtgaggtcaggagttcgagaccagcctggccaacatggtgaaaccccatctctactaaaaatacaaaaattagccgggtgtggcagcatgcacctgtaatcccagctacttgggaggctgtggcggagaattgcttgaacccaggaggcagaggttgcagtgagctgagattgcaccactgcactccaacctgggtgacagagtaagactctgtctcaaaaaaaaaaaaaaaaaaaaaaagtgtaggaaagcaatagtacaaacgaggaggggagtgggtgagttaaacacattttccccaaactgccaggtttactttgcagaatttgtattctctttcacagataacataaccctcattcccagcacaccacaaccaagctagctagctggctcagctcacggtgtccttcggccacatcgggactcagcatggtatatgttctggtcatcacccagagaattctagctattcattttgactcttcagtttcgctaagatgactgcatgccagcaattttaacttatttattaatttgaaaataatgtgtggctgggccgggcacagtggctcacgcctgtaatcccagcactttgggaggccgaggcaggcggatcacgaggtcaggagatcaagaccagcctgactaacatggtgaaaccctgtccctactaaaaatacaaaaaattagctgggcgtggtggcatgcacctgtagtcccagctactagggaggcttaggcaggagaattgcttgaacccaggaggcagaggtcgcagtgagccaagatcacaccactgcacttcagcctgggcaacagaacgagactccgtctcaaaaagaaaaaaagaaaagaaaaaagaaaaagaaaatatgtgtggctggaagacactgaaatctggaaaacagctatttaggtataaatttactttgacttactgagatcaagaaagaactgacatcgtcctcatctaagataccttgttctccttgggtattttccaagttagttcaggggcagttgccgaggaataacactgatgggggttcacactatggcgatcttgttgaactgcctgatgttggtttgtgtaatctgccccctttgtgcccaagaacctgtgacaagattctgcttctgacaaccttctgtgcaggggtagcgacaggagtctgaacaatcattaagtgtccagccctggtttcctgccactagtcaatctgcagagacttttattgattcttgaaaatacaactgtgattgtaggtttgggccctgggaatgtaatttatagctaaagaatgggcaatgtcttctgtcctgagtgccatggttggattgtgtaacatctgtggctaccaggacaaggaaggaacaaaggaagacaaaagtatttcagtgcagagatcttctcagtgaccctccttgcttttcatctgcctgatgaattttaaagactactttttatcatatctccacaccgtaaactaccccctcagtggctcccagtttccttttactacatctagtctacactccatagaccgactgagactgccaatatgcctacccagtcggatttcctactcttcctccccccatacatttgctgctctggtctcctgaaaggttacattccctcacctctgattgtttcccttagaaaccctctcatctcctttcctctgggtctatctaaatctcactcagaatcctagatatattaccacaagcccctatcctcctatgtttcccattcctttgctcctgtgcaaccagggctcaggctctggagtcagacagatttaggttcataatcccagttctgccacttattaactattactccataaatgtggaaacatttctcaactctttttttttttttttttttttttgagacggagtctcgctgtgttgcccgggctggagtgcagtggtgtgatcttggctcactgcaacttctgcctcccaggttctagtgattctcctgcctcagcctcccaagtagctgggactacaggtgtgtgccaccacacccggctaatttttgtgtttttagtagagatggygtttcaccattttgaccaagctggtctcaaactcctgacctcaaatgatccaccctccttggcttcccaaagtgctaggattacaggcgtgagccgccgcgcctggccatttcttaacttctgaacctcaattttcccatttataaaatgggtaaaaagtggccagcacgtgggtcaggcctgtaatctcagcacttcggaggcccaggcagaagaatcgcttgaggccaggagttcaaggtcagccggggcaacatattgacatcccgcctctacaaaaaataagctgggcagggtggcgtgcacctattgtcctagctattcaggaggctgaagtaggagaattgcttgagcccaggagttcaaggctgcagtgagttatgattgtgctactgcactccagcctgggcgacagacagaaattctgtctgtacaaaaaatgaaacaataaagtggataagatggggataataggacctagagtgtcatgagggtaagtgaatgaaataaatcacttattttagtagttggcaaatggcactcaaaaaaattagttggtgttgctattgttattttgttgacttttgtctgaacctcttcttattctatcagattacagcctgaggttggccaattcaattctatttccctagcctctattgtctctcagctcttcagctttgtgccctaccaaccttaataaacaggtgccacactctaatttcacagcctctgctccaggaatgttgatgctggagagagccctgtaaccaggctgattggttcaacaataaattcttgcttctgaacctcagctgagccctttctgctgctccacaaaccctttactgctggttctcaattgtggatgctcattagagtcaacagaggcgcttatgaaaccactagtgcctgggccccatcccaggagaattaaatcagaatccttggggctggggtccagcgtcatttttttgtgtgtgttaaggctccctggatgatcctaatgtccagccaggaatgagaaccacttaattgttcttcaaggacaattatttcctactacagcattccacatcttttcttctatccataagcttaccttcaaatcaaatagaagcttcataaacttcccaccttcataaatccacagaagcttcataaactttccacctccctccctgacaaacttcattttgttcctttcttggaagatagagcatcacacctcctatgtaaggctaatctatccttttttaaaataaaatattccattgattacctcctttcctttatatttttaatattattaaatgtttctctctctgttgcttcttcctctcaacctggatttgttcccaagtttttctccattctaaacaacaaacaaaaacaatcttccctcactctggttccaggttgaatgagagaagagggaagaacaagtattcactgaagggctcccagggacaggcgctatgttaggtgacatccgttgcaaaatcttggccattcttgctctgggatatcacttccatctctgcttctccatgattactgccactgtctcaacccagggtttttttcttttgcttagactatttactggacttcctgcttcaacctcttttcctctctaacccatcctgtacagtaatgccagagtagtcttcccagtcagatcactattctgttgaagagtctttcataattctccattaactactggataacatttcgatccctcatctctcttcagaataagtaggaggcccttgggacctccttgccccaaaccccatgagtgatctgaccttctgatcattgctgggataagacaggtcttgtgatatttttatctttgaatttcttggttcttctcataatttgtttcagcttaaatgttacctcctcctagttgccttccctgatgatattaaagtagtgcccctctccctcactctgtaccccattaaatgatctgaaattattttgtttacatgttgattgcctatgccctccccaacagcaagcccaactcaaatccacttctaccattgagctttgctgattcatcccagtgctccttgtgctcccatcactttgagcttgctcattgctaaggtgataaaatcagatttcttcagaacacactgggattttctagggtaattattattagtgctcctgtttatcctcagaactatcccaattgggacaataaattatataatcactggatttatagtcttgtgtcatacccatttgtaaagatgtgttatttctaagctcactgaggacaggaacaaagtcatgttcatctttctttcttttttttttttttttttttttttttgagacaaggtcttgctctgttgcccaggctggaatgcagtggcacaatcacggctcactgcagcctcaatctctgggactgaagctatcctctcaccccaacttgccaagtagctggaaccacaggcaggcaccaccatgcctggctaatttttaaattttattttattttaattaattaattattattattttttgagacagagtctcgctctgtcgcccaggctggagtgcagtggcatgatcttggctcactgcaacctctgcctcctgagttcaagcaattcttctgccttaccctcccaagtagctaggactacaggcgcgtgccaccatgcccagctaatttttgtattttttgttttaaatttatttattttttgagacggagtctcacttcttcacccaggctggagtgcaatggcacgatcttggctcactgcaacctccgccttctgggttcaagcaattctcctgcctcagcctccccagtagctgggattacaggtatgtgccaccatgcctggctaatttttgtcggtatttttagtagagacagggtttcactttgttggccaggctggtctggaactcctgacctcaagtgatccacccgcctcgggctcggcctcccaaagtgctgggattataggcgtgagccaccacgccaggctattttatttttttgagatggagtttcactcttgttgcccaggctggaatgcaatggctcgatctcagctcactgcaacctccacctcccggtttcaagtgattctcctgccttagcctcccaagtagctgggattacaggtgtttaccaccacacctggcaaatttttgtatttttagtagagatggggtttcaccatgttgaccaggctggtcttaaacttctgacctcaagtaattcgctcgcctcagcctcccaaagtgctgggattataggtatgagccactgtgccggccttattttaaagagacaggggctccctaggttgctcaggctggtctcaaactcctggactgaaacaatcctcccacctgaagtgctgggattataggcccgagctaccctgcccagcctgtgttcatctttctttcaccaataacatctagtaaggtattttgtatacatatattagaagctcaggaatctattgaatgggattggataattgattaaaataagacaatgtatgtggagagactagcacgatatctaatacatggtaaatgtgttaaattcttttttcccaaacgtggtatgtgctaaaaattaaaataaataaatagataatgttaagttgttttttttttttttggaaacagattctgtctctttcacccaggtgtggatgtgcagggggccctttttgtggttcactgcggagctccgcttcccaggttcacgctattctcctgcctcagcctcccgagtagctgggactacaggcgcccgccaccgcgcccggataatttttttttttatatttttgatagagacagggtttccccgtgttagacaggatggtctcgatctcctgacctcgtgatccacccgcctcggcctcccaaagtgccgggattacaggcgtgagccaccgtgtcccgccttttttttttaagacaaagtatcactttgccatccaggctggagtgcactggcatgatcatggctcactccagcctcaatctcctgggctcaagcaattcctcttgccttagtctcctgagtagctgggactacaggtgcatgtcaccacatgcagctaatttctttatttttttgtacagacgatggtcttgctatgttgcccaggctgatctcaaactcctgggctcaagcaatcctcccaccttggcctcccaaaatgctgggattacaggtgcaagccaccatgcccagccttgaagtttaataaatcttactttcccttccctcagatgggtccaggtgtcatatctctcaagacctttgtttaccaactactctacacagtttagtacccaagtatgtaccagcttgtttgcctttattgagctttttgtgatgttgtttcttttaccacatcagaagctttcatgtatcatatcttataattatcaattccagatagcagaactagttctttcttgtaaattggttgatattgagatgttcaatatctattggctggttaatttgcaggaaggagagaaatgatgacaaagataccaggttaggtgcccacagtcagtggcacaagcgtaaaggatcatgttccctgtttgaagatgcatgtatatgcgttctagcaagcaaaagttggagcttctaatatatcctctcaacgttttcagtaactaaaaagatacagattcaagtgatcaagtaatctttacacaagagtataatgccgcttggaagtaagggaagaatgaaaaatatgcttagtgtagagatctgactatggaatagtaagactggggtttgaattcctaaattatttacaaataacttccctatgcctgttctctcatctgtttaatggggatggtacatctgcctctggggagcttgtaagaagagtaaatatgaaatatatatatatatatatatatatatttttttttttttttttttttttgagacagagtctcactctgtcgcccaggctggagtgcagtggtgcaatctcagctcactgcaacctccctcacccgggttcaagtgattctcctgccttagcctccagagtagctgggattacaagtgtgcaccaccacacctggctaatttttgtattttttagtagagacagggtttcaccatgttggccaggctggtcttgaactcccgacctcaagtgatccgcctgcctcggcctcccaaaatgctgggattatgggcgtgagccaccactcctggccttaaatgataaatattaatagtttacataaaatgctcagcatagggactggctcattacaagccccaatcagcaatagctgtttttataataggcagtctgagccactacaaaacctggatgtgaaaggtgaagctagctaagatcattaagttctcaaattttaagttaaatcttgtttctaatgccaaggacaaactataattctttacttgttcgattgattcttttgttcattcacttattattcattcatttattccataccaggtacacaataaatgcttattaaatgctattgagtgaataatagtaagtaacttgggggaaaatagagctttttttttttttttttttttttttaagacagtctccctctgttgcccaggctggagtgaagtggtgagatcttggctcactgcaacctccacctcctgggttcaagtgattcccctgcctctgcctcctgagtagctgggattataggcttgcaccaccacgcccggctaatttttgtatttttagtatagatggggtttcaccatgttggtcaggctggtctccaactcctgacctcgtgatctgcccgcctcggcctcccaaagggctgggattacaggcatgagccaccgctcctgtccaagagctttttaaggatatgccctcagtgatatctgtcaatgagtgtaaaataccccgtgaccaggaccaggacaccatgctggatgctgaaggttcaaatccagctgtgtcacctattgggaacccagccagggatgtgcagcattcattccttcaagctatctaacctattacctactcaaggcagatgactgcctcatatttaatggaaaaatcaaggtcatagtgctgaatgttcctcaatttcccttctcctctagacccgtcttccactgaatctggtcttaacctcattccctgatatctcttccctccagtacccaagagcagagttaatcacttcccagtcatctgtgccaccatcgtgcaaatttctattactgcaaagtagcagagttgatttggttgtaggtttgccttccacaagaactgagtctgtctatgtcttattcttctttgtgtgtccagcacctcacatatggcctggcatttagtaggtgctcagtaaatgcttactgaaggggcttttgagtttttgttttgtttcatttttgagacagggcctcactgtggctcaagctggagtgtagtggtgcgatcttggctcgctgcagcttctgcctaccaggttgaagcgattcttgtgcctcagcctcctgagtaactgggactacaggccctcaccaacaggcccagctaatttttgtattttttggtagaggcggggtttcaccatattggccaggttgatctccaactcctgacctcaaatgatccaccctgctcagcctcccaaagtgctgggattacaggcatgagtcgccgcacctggctagaaagagcttttgaatcaactacttccctttagtctcctcttcaaaaataaactttccaaaagacctacacactacctcaatttccacttccttatcctagatctctgtacatctaatctatcaccaagccctatgaattcaacctctaaaatattttctgaatatgtccactccttgttgccccattgcctccaccttcatccagacagatatctttcattggcctgtttactgctgtagtctcctaactagggctccctatttattctcgtgttagcccccatctattctgcgcacagccttagtgattattttaatgtaaatgaaagtatcattactctgcattttcagttgcttcccaatgagctgaggatacactccacattccctgctctggtctacaaggacctacacaatctgaattctaccaatccctccctcttcaactcatgccatgccctagttgctcattcggctccagccatgctggcccttagaggttcggatcagctcaactctttcccacttcacaacctttgaatttactgtttcctctatctggagcactcctcccctctcctcacacagctgctgcttcttattctttttttttttttttttttttttagatggagtttcactcgcccaggctagaatgcagtggcacgatctcggctcactgcaacctccgcctcctgggttcaaacaattctccagcctcaacctcccgagtagctgggattacaggcacccgccaccatgcccgactaatttttgtatttttagtagagacagggtttcaccatgttggccaggctggtctcgaactcctgacctcaggtgatccgcccgcctcagcctcccaaagtgctgggattacaggcgtgagccaccgtgcctggccagaactggcttcttaaaacaaatttatcagccaatttatccaaacttcatggattggcacacaagatgtcttcttccaatcctaattccttcctccctgtctctcttggcaccctctttcccctccctctttcatgcctcacctttacagaaattcagttcagtttaataactattaactggacatccactgtgttccaggcactgtacttgactatgggggagaaaatatgaatgaaaacagatagctgacttcaaggaatttatattctattagtagcaaaggtagatagacatatgaacaaatataacacaatgttccattccataatgaagatatatactaaggctagaagaagtactgaggaaaaagtaattaattctgcaagggtacaatggcatgatgcttcagagaaggtttcaagatgaaattctgaggattttgaaagttgggtaggaaatggtcaggtggatcaaggacggaaaaacattactggccgagtcaacaacaggttgactaggatctggagtgaagtcccgcaagtagctttagtgtgtatgtgtgtgttggggagagaagtggtgatacctgaggctggagaggcatcaggagtcactatatcaacagcctctgtkttgggctatgaagtttggacattatcttataggtgaggggaaccattaaagatttcgaagcagcagcaggatgacttaatgggactttaaggactattactctgacaaccaaatagagatagattaagaagggccaagcatatcagtgaggaggtccctcatcatctctcagactatgatggaaaatggctcctaactgatctctttggccatctaatccatcctctacccagcaagaagagaaagaaggagagagagcagaattcactgagcagataagttaaatgacaggacctggggataggttggatttggggaggaagaagatggaaagaatgatgtctaggttactaggtctgtgtacttgatgaggttggaggcaatagcaactgtcagagtctaagagaaagagcaggtttcatggcgggcatggtaaataatgctttcagagatgcataagttgaatactgaatctggggtgcctctagggaacctacctcgcaatatgggactggaggtaggagagaggtcagaggtggagatagggaaggtaccttctgcatagagatggcagttagaaccacaggagtagacatgatctctcagggaaaggtgggtaaagctgggaagggggagaaaggatgagctcaggaaagagcaacaccaggtggagtcagacagtggaacaggatttggcaaggtggctgtgaagggagagacaggcagaggacaggaaaagagtggtgttccagcagccagaaggagaggggacttcaggaagaaggagtggttgggaattttaaggaagtaagacgagggccaaaaactactgttggttttggcaactggaaagtcattgctaaccttggcaagagcatttccagtatagcaccggggcagaagacagattttagtacggtaattgatattgataataatacctaatgtttattgactgcttgttatgtaccaggtgtgcgctgttttatatgaatgatcttatttaatcctcacaacaaccctccaaagtgaggcaggcacagttatctctctctttagggggagggaaacaggcttaatcgtaagaatcagttggggtataaacccaggtctgtctgtcaagaaactccatactccacttgatcttagccaaaaggccaagaggcaatacaaactccatactcttcatgactcttctttatcctttctttcaagtgaatggaaggtgaggaagtggggacacagtcttttaagaatcttggctgaggtggggagcagtggctcacacctgtaatcctagcattttgggagaccaaggctggtggatcacctgaggtcaggagtttgagaccaagctgggtagcatggtgaaaccccgtctctattaaaaatacaaaaattcggccgggagtggtggctcaggcctgcaatcccagcactttgggaagccgaggcaggcagatcccgatgtcaggagtccaggactagcctggccgacatagtgaacccccgtctctactgaaaatacaaaaattagccaggagtggtgtcccgcgcctgtagtctcagctacttgggaggcttagacaggagaattgcttgagtccgggaggcggagattacagtgagctgagaccatgcccttgtaccccagttctgggtggcagagtgagctcctgtctcaaaaaaaaaaaaaaaagccaggggcggtggctcatgcctgtaatcccagcactttgggaggccaaggtgggcagatcacctgaggtcaagagttcgagaccagcctggccaacacggcggaaccccatctctactaaaaatacaaaaattagccaggcatggtggcaggtgcctgtaatcccagctactcaggaggctgaggtaggagaatcgcttgaacccaggaggcggaggttgcagtgagccaagatcgtgccattgcactccagcccgggggacaagagcaagacttcatctcaaaaacaaaaaaaaaataaaagcaggattcttcatcatattagaatttcagataaatgaagaagaaaaaagaaaaaaatcattctgctataaaaacacatgcgcatgaatgttcattgcagcactattcacaatagcaaagacatgtaatcaaactaaatgcccattaatgatggattggataaagaagatgtggcacatatgtaccatggaatattatgcagccataaaaaatgagatcatgtcttttgtgggaacataactggactggagctggaggctatcatccttagcaaattaagacaggaacagagccccagatatcacatgctctcacttttaagtgggagctaaatgataagaacttatgaacacaaagaagggaacaacagacactggggcctacttgagagtggagggtgggaggagggagaggagcagaagagatcactattggctactgggcttaatacctgggtgatgcaataatatgtacaacaaacactcatgacacatgtttacctacgtaacaaaccttcacatatacccccaaaccaaaaataaaagttaaaaaaaaagtgtagacatatatgcatactccttagctctatgcaccaagacagtttggaaatggtcatactctaatagcagttaacacccctagtcccaaatcttggtctctaaataccgttctccactaaaagaaaccagggatccttggagaaatgattgatttcagggctgagacaaggaaagtacaagatgaactcagaccatcttgctgtggcagaaagtaaagaagtgcttaaagaatgacagagatatgtcaacaggatgtcaaaggggcttgaagggggctcccctaaccaactctgagcatcaaaataaataatgacagtaaaaggtcataatctatcaaatgaagtgggaatccacatgttcatactgataagaataaaagaatacataaacaaatgagaacatctttctttacagcagaataacaactaataaatttagaaggaacaatgaaattgaaaaaaccactattaggcaaacttcatagtaataattcattcagcaaaaaaaaaaaactaaaaatagtgaggaaaactatgataaggaacaggatatgtacctcaaagaagtacctttccacaaaacacttactaattacaaagggcaaaagagtaactttacagtggaaagacctagcagacaccaccttaatccaggtcaaagttaacattctggtgaggtttggattaaaaacaaatcaaatatgcaaacaaaataaacgattgtatcaaattttttttaaaaagagaacaaagttaacattctcaataatggtacaaattgaaatcaggtaccaccagatgggaggcaataacacagtatcacttctgtcctattcctgccaaaaaaaaagaaacactgagaaattgttccagattgaaagaaacatgagccaggtgtgcagtggctcacgcttgtaatcccagcactttgggaggctgaggcgggcagatcacctgaggtcaggagtttgagaccagcctggccaacgtggcaaaaccccgtctctactaaaaataaaaaaaatagctgcgtgcggtggcaggtacctgtagtcccaactatttggaaggctgagacaggagaatcgcttgtacccaggctgtggaggttgcagtgagctgagatctcgccactgcactctggcctgggtgacagagcaagactccatctcaattaaaaaaaagagagagaaaagaaaagaaagaaagaaacatgaaaacaaatgcaatgcatggtcctggaagagacccttttaatataaaggacagtattagggccgggcatggcagctcacacctgtaacctagcactttaggaggctgagggaggaggattgcttgagcccaagagttcaagaccagcctgggcaatatagggacctatctctatgaaaaacttttttaaaaatttgccaggcatggttgtgcacatctgtactcctagctactcaggaggctgaggcaggaggatcccttgggaagaacagttccagactatgctatgatggcaccactgcactccagtctgggcaatagagtgagaccctgtctgaaaaaaaaagggggggtaggggggacagtagtgggacaattagagaaatctgatctgggcctgtgggttagatggctgtcatatacttgtttgagtgtgtactcatgttgggaggatgggcattgtgttggaaatttaatcttggatggttcagaaaaaaagttcttgaaattttttttaaatttaaaattctttcagcataaaatgaaaaataaaattttaaaatctatcagtaattcctctgataaataagataagctattgaattaatggaacaaaaacagtacacataaagagaaactttcataaacaagaaagagctcttggaaattaaaaatatgatagaaaatttgtttaagtgttcaacagaaaatgtacaaagtaaaattgaagaaatcttagagataaaagacaaacatagaaaacagaggaggatggccgggtgcggtaactcatacctgtaattctggcactttgggaggccaaggcaggaggatcacttgagcccaggagttcaagaccagccttggcaacacagtgagtccatgtctctacaaaaaatttaaaaattagctgggtgcggtggcagtcacctatagtcccaggtactaggggtttaggggagctgaggtgggagggatcgcttgagcccttgagtcaaggctgcagtgagctatgattgtaccactgcactctagcctgggcaacagagctgagaccctgtctcaaaaacaaacaaacaaaaagaaaatggaggaggaaaacacaaaatmcaagctccaaggcaattagattaggccaggagatccagcatctaactaatgggtgttcaaaagaaaaacaacatagaaatcagaagggaagaaatcatcaagcaagtaataaagactaatccccatattgaaggatacgaatcgctagattgaaacgtcccatctagtgccagcacagtcaatgaaaacagacccacagcaaggcacatcatcaagaaatatcagaaaatcaaagacaaagagaagaggtctcagaaagggaaaacctaaactaaacaaaaacaggccacatagaagagcttaggaatcaaaatgactttagacctattaacagccacactgacaccggaaggcaatgaaggagtgccttgaagattcagaaggaaaattctgtacaacctagaatcctaaatagagccaaacttttgtatgaagtatgaaagcaaacacacatattttcaagcatgcaaggtctccaaaaatttatttctcatctatattttattcaggaagctactgggggatatgtgtcaccaaaataaggacataagccaagaaggaggaaaatatgggatgaggcgatacaatgggagaaaaaggtaaaggggatctctagaaggtgatgaggagaggtcagaagacagctctgcaccaggagtagtagcaaatgacagaaaccgaatgcaaactagtttaagcaaaataaaaatattggcttggcatgatggctcacgcctataatcccagcactttgagcggccaaggtgggtggatcacttggcgccaggagttcgagaccagcctggtcaacatggctgatacggtttggctgtgtccccacccagaatctcttcttgaattgtaatccctataatccccacgtgtcaaaggcaggaccagttggaggtaattagatcacggggcagtttccccatgctattctcatgatagtgagtctcatgagatctgatggttttataagcatctgacatttcccctgcttgcactcactccatcctgccgccctgtgaaggaggtgcctgctcctcctttgcctgccatgattgtaagtttcctgaggcctcccaagcaatgtggaactgtgagtcaattaaacctctttcctttataaagggtatttcttcacagcaatgtgagaacggaataatacaatggtggaaccccgtctctactaaaaatacaaagattagacaggcatggtggcacacacctgtgatcccagcttctcgggaggctgaggcatgagaatggcttgaacctgggagtggaggttacagtgagccaagatagcgccaccgcacttcagcctgggtgacagagtgagactgtgtctcaaaaaatatatatatttaaaatatatatatatatatatatatatatacaaaatgttgatatgtgtggtggggtaggtgaaggagtttgtgcaaactgaaaagtccaagattcaggttttcaaatgctgttgtcaagtttgtctctctttcggctgttttcctgtatttaggctctttgtgtggcagcaagagggactctggaagctcaggtttacctgctagtttatgcataagataacaacagggccaggtatggtggctcgcacctataatcccaacactttgggaggctgaggcaggaggattgcttgagctcaggagttccagaccagcctgtgcaacatggtgagacccccatctctaccaaaactacaaaaaattttaaaaattagccaggtaaggtggcctgtgcctgtagtcccagctactagggaggctgacgtgggaggatcccttgagcccaggaggttagaggctagcattgagctgtgatcatgccactggaggactctagcctggtcaatagagcacgagcctgtctcaaaaaatacagaaagaaaaacaaaagcatcatgataacgtcacgataacactttcctgatgacgctcatgaaactcccagggcagattctaacaggcccagcttgggtcatgtgtccatcccacaaccaatcattggtaagggagatggaatattctgattggccaggcaaggtcaagtccccagccccagggctatgatccaaagacaatgatatcacctgcaaaggtctgatgagcactttgtaattggtaaagtgtgcaaatgtaacaattatcacctgtccatagcagattagaccgtatattagaaggaaagagagtctgtattaagtaagctctacccttacagcaaagagaagtagaagtggataacagggagactgacaggaaaaactatacaaattccacatagaagtgcagcattctgggacatttgctgtagaaaaaaatggttctacaaactttattatataacattgttatcaccatgatctatttagaaaaggtttgggggttttttgttttggttttgggtttttttggttgtttttgtttgtttgtttgttttgagacagggtcgcactgtgtcacgcaggctgaagtgcaatggtgcagtcacggctcattgcagcctcaacctacctgggctcaagcaatcctcccacctcagcgtcccgggtagctctgactacaggtatgtgccgcaacatccagctagtttttaatttttttgtggagactgagtcttgctatgttgcccagactggtttcaagctcctgagttcaagtgatcctccaacctcagcctcccaaagtgctgggattacaggtgtgaggcggaaaagtgtaatatacattttaaaattcatgtctggagaagtcatccttgtctgtgtgtttaacttgtctatccagaatgactttttccaaagttgccaggtagctggtgatttaatagggaccctgtcctagtggagagtcaatctcattcagaagatgatgtaggtttattacaggacagcaaacagtgaaaactaaattggccatttatacattaagttctatatactaattatgttttcagttccacactccaaaacagaatatcgaattgggtgggtcccttaaagtagggcaattctcatgtttacatgttaagcttgcttggccagaacttgctaccctaaaaatatactcactctactcacatgtaggatgtaaacacatccctctttgcagatctgtgtttaatctcttgggttctctttagcaatttcctcattagtaagttgtgtgttggtggaaagtgctcccagcagcaaaaacacaagcaggtgcataacatgtggattatcatgctgatagcacttatcccagaagatgacacatctcaccctttttccattttacaaacagctctgacattagatccacctgttacttcaggacatttcaggagcttttcctcagaaagtccaatctcctccccagctgatctgcttctcatcccattagcaatgtcaccacactttatgccgtgtgcgatcatatccttccccaagttatgactatatcgtagggagaagaaaagagaagagagaaggagaaggcaaaggagagaataattaattcatagttcatttattaacttcctaggctttgattacttgcctgaatccattttcttcatatttgggctgtacagtaacctgattcttttgttttcttctgagacaggatcttgctctgtcgcccaacctggagtgctgtggcaccatctcggttcattgcaaccttgacctccgcaggctcaggtgatcctccccactcagcctcctgggtagctgggaccacaggtgcacaccaccatgcctggctaatttttgtattttttgagacagagtctcactgtgttgcccaggctggtcttgaactcctgggctcaagcaatcctcctgccttggcctcccaaagtgctgggattataggcgtgagccaccatggccagcctcaattaatctttatattctcatttcccagtatattcttcatccttcttcatctgcttatcctcaaaacctcagctcaaagccataaggccttaagtctgtttccctcattagaacataagttcaacctggcagggtggctcacacctgtaatcccagcactttgggaggcccaggcgggaaaattgcttgagcccaggagtttgataccagcctggacaacatgggaaaaccccacctctacaaaaaatacaaaaattagccaggcatgttggtgtgcacctgtgatcccagatactcaagaggctaagatgggaggatcacttgagccagcaaggtggagactgcaatgaactaagatcatgccactgaactccagcttgggtgacagaatgagaccctgtctcagaaaaagacaaaaagaaaaagaaaaaaaaagaaaatctatcactcttccatcttttccctgtacctataatttattcattcagcaaatatgtatggattgcctactctatgtcaggcagtgtgtggctgaatggttctcctgttataataataatgataataacttaaaagagaataatgtttatcaaggccagcctgagcaacataaggagaccccatccctacaaaaaataaaattaagttaaaaaaaatcagggctgggcaaggtggctcacgcctgtaatcctagcactttgggaggccaaggcaggcaaattgcctgagctcaggagttcaagaccagcctggtcaacatggcaaaacctcgtctctactaaaaatacgaaaaattagcaggacgtggtggcatgcccttgtaatcccagctactcaggaggctgaggcatgagaatcgcttgaacccgggaagcagaggctacagtgagtcgagatagtgccactgcactctagcctgggtgacaaagcgagactctgtctccaaaaataaataaatgaataaaaataattatttttgttgagacggtctcactctgttgcccaggctggagtgcagtggtgccatcttgcctcactgcagcctcaacttcctgggatcaagtgatccgccccagcctcccgagtagctgggaatacaggtgcatgctatcctgcccagctaatttttgtactttttgtatactctgggtttcaccatgttgaccaggctggtctcgaacttagcttaagcgatccacccacctcagactcccaaagtgctgggattataggcgtgagccaccgtgcctggccaaattaagttaaatcaaattaaaatttttaaaaaagaatgtcacagaaatggaatcatacagtgattaacttttttcacatgctgtatataaattcacaatccattttgaattaatttttgtgtaagatgtgaagtttaggccgggtgcagtggctcacgcctgtaatcccagcactttgggagtctgaggtgggtggatggatcgcttaagctaagttcaaaaccagcctggtcaacatggtgaaaccccatctcctctaaaaatacaaaaaattagccgggcatggtggtgtgcacctgtaatcccagctactcaggaggctaaagcaggagaatcactggaacccaagaggtggaggttgcagtgagccaagatttcaccactgtactccagcctgggcaacaaaagcaaaactctgtctcaaaaaaaaaaaaaagtgacatttaggtcaaggttctttttttttttcttttgcctatggatgtccaatttctacagggctattcattgaaaagactattcttcctccattgaattgcttttgctcctttgtcaaaaatcaatttctggcttgttccattgacctgtgtatctgtcactactccatactgtttaaattactatatctttacagtgagtctgtagcaatacagtaaatcttaacatcagacagaatgattgcttccagattattcttctgtttccaaattgttttagctattctagctccttcgactttctgtataaattttagaataagcttgtcttcacttacagaaaatcttgctggactcttcaattttaataattttaaagttttcttcatttcatttatttaatgtgtattagcttttaaaatgatttattctattgtatgtcacacagatggtcagaagacaccaaatttcctatgtttctaagaggtagggcaagccctcttttgtcatggtagtcatcaaataattccatacgttatctttacaagtgttccttaaacctcacagcaaccctaagaggaatatactagtagtctctctgttttacagatgaggaaactgaggcatggatagattacataacatgtccagtgtctcatagctagaaagtggcagagttgggatttgaaccaaagcaatctggttccagaacacatactgttatcctctgtgctatgctgttctgtttgaatatagttatctcatccaagaaatttttattcagtgcctattatgtgccaaggactgttctaggtgctgtgtgttctaggtgtcctatggcacccatgagtaaaataaaaataaaataaagcagtgattaagacaaaatcccagctcccatggagcttctattgtaaagggggagaatttactgtattaatgcaataattattgttttgttgaagtattattttattatttgatttatattgagaacacagacactttaaatataggagctgggatcttacccaaaagatatgcttattcactggatataaatactcaccataattctaccaatcttctggagactgaaaaatccctcagttgggagatagataaaaccatcttgggccgggcgtggtggctcatggctgtaatcccagcattttgggaggcggaggcgggcggatcacgaggttaggagatcaagaccatcctgctaacacagtgaaaccccgtctctactaaaaacacaaaaaaattagctgagcctggtggcacgcgctggtagtcccagctactcaggaggctgaggcaggacaatcgcttgaacccaggaggcagaggttgccacgagccaagatcacaccattgcactccagcctgggtgacagagtgaaactctctcaaaacaaacaaacaaacaaacaaacaaacaaacaaaaaaccatcttgacttcaaacaccatagattagttttaactattttagaactttagataaaattatacggtatattttcctttctgacttcttttgctcaacattatgttggtaagattcacacatttgtcgcatgtagttgtagtttgttcattcttgttgtgctgttccattgagtgaaataacctagtttatccattctattgcatgtggagatagagattgtctccaatggccgggcgcggtggctcacgcctgtaatcccagcattctgggaggccgaggtgggtggatcacttgaggccaggcgttcgagaccagcctggccaacatggtgaaaccccgtctccactaaaaatacaaaaattagccgggcatgatggtgcatgcttgtaatcccagctactcaggaggctgaggcaggtggatgacttgaacccgggaggtggaggttgcggtgagccgagatagtgccactgcactccagcccaggtgacagagctagactctctctcaaaaaacaaacaaacaaaaaatatgattgtctctttttgacttacaaatgttatatattttaataaaaatatattaaaatacattataatatattaaaatatattataataaaaataatattaatattaatatttgacttacaaatataaatagtatatgattatggtcagttttaatacggccaaacaattttctaaagtcataccattgtttcatactgctttcaaaaatgttcttttgttttcccttatatttagcaaaatattttgttgaggactccaactcatttcatctacaaacaaaagtttaaaaatctatgcttagaccaaagggatggaaaaagaacagcaaagacacaggaaacctgagggaggaggaaactgggacagattcaggactgtttggccagccagttcttcctgtaagatattctctttcaagagctaagctttgggggttctaattctgttttaataaaacacagtgttcctttacatagttgaactgaattgttttccaacaaatatgaattaaattgcctcattatttatttaggttaaacaattaaactgtaagcttaagaggaaagggaccttgtacattcttcaacattatagcctcagacataacagatgctcaataaatgtttggataaatgaatgaataaataaatgaatcagtttcctaaaacttagcaactatctatcatgacctgatgtagcatagttggttcattatgctgtgtctcaaattcaatgatccaggcctttctcctgagtctaccccaaataccatgagactatattggagctctcttgggattatacatggaggatcaataggctggacaaccccactccctcagacagtcagcctggcactgcccttatagagatcctggtcaaacagtagacataggccaagcacggtggctcaagcctgtaatcccagcactttgggaggccgagttgggaggatcacttgaggccaggagtttgagaccagcctgggcaacatggtgagacctcatttccattaaaaataaaaaatttagccatgcatggtgtcatgcacctgcacttcccagctattcatgaggctgaagcgggatgatttcttgagcctgagaagtcaaggctacagtaagctgtgattagcctgggcgacagagcgagaccctgtctcaaaaaaaaaaaaaaaaaagagataatttatgaaagaatatgtacacacactcagaatgatgcatgtggcttaactgtttacaagtgtgaataaatggctcatttacatagagtatcacatttaatcctctcaaagccctaaggggcttgttattataatcttcattttataaatgaggcagttcagagaaatgaggtgagttgttaaaggtcacaaccagtaattgttaaagcctcaatttaaacttaggtctgtctagagcctgagattttaagaattatgtgtgcataaataatttaaaaattaaattttctttggctctcaaggacatgtatttttgcatctgatttcaattaagctaaatacatttggtgccgactaggtaccgaagacatttatataacttaagataatatcacaatgtatttaccttctctaagcactccttcagcttccctgattaggaggcggctgggccttgaaagaaaacttcctttctgatgtacggaacagaggactaggagcctgcgtgagtaggtcttagggtgaaggaagccttttcagaaggggagatgagggagagaggaaaatgaattggcaggaaaaaggcagaaaaggtatatttcaagagggaagtctgaaaattatttccatcagagctttctgtgacttgttttaatgatagccatccaggctttttattttatttatttattttattttattttgagatggagtctcactctgttgcccaggctggagtagaatggcgcgatctcagctcactgcaacctccgcctcctgggttcaagcgattctcctgcctcagtctcctgagtagctgggactacaggcgcccactaccacacccggctaatttttgtggtttttttagtagagacagggtttcactatattggccaggctggtctcaaactcctgaacttgtgatccacccatctcggcctcccaaagtgctgcgattacaggcatgagccaccgcgcctggccagccatccagttcttgaaggccaaagaaagcataataaacctgaagattcttggcagatcctggcattgctggactgcagggtgcataaacaccctgggtgacagatgacgtggccggccatctcaggcccatccctgtgcactgggtctggacggtgccagctccttggcaacactgcaggctgttatgaccctgtgccagggcgggggaggggccgagcaccaggtgacgtggcaacaccgcagtcaaaggaaagccatgctaagaggccactgccccgcagtcctgtgacaggcaaggggaatgcaggaatattggggaagaggggaggggtggaggggaaggatcattgttgcacggctctagcaagaaagaaaatctaaaattctgcttcatggctcagctcccagcacagctaatgcttggaatggaccagttgcctggacagtttcaattatttgtcataagcagctcaggccttggtgtgcagatttcctttgcccctcagtttcagatagcccactgtggcccctgctcatgattcagactgaaatagctgcctgttttgcatgccagttaagcctgcatttcagttcttgtttctttgaaaggacctgtcagggaagcagtatgaaatgtcaggttccggtttggtattccccctctaccttcaaccttgtagcttgacttttgtgggattcccactcatgctcagagtcccctcatgcgaataggcttatctaattcacaagtagctcggtgatgtgatgatgcctggccctgtgaaatcatattttttcaccttacatcaccttccatggactggctggaattcagattagttagccatcccattcttgcttggacatgcttattaaagatagaggatattggccaggcgcagtggctcatgcctgtaaccccagccctttaggaggctgaggcaggtgaatcatccaaggtcaggagttcaagaccagcctggccaacgtggtgaaactccgtctctactaaaaatacaaaaaattagccgggtgtggtggcacgcacctgtattcccagctactcgggaggctgaggcaggagaattgcttgaacccaggaggcagaggttgcagggagccgagatcgtgccactgccctccagcctgggcaacagagtgggactccatctcaaaaaaaaaaaaaggcattatcaattatcaaggaattatcaatttcttcctacaaaataactgaggagtcctacatagatctttacaattgtctgtgtagaagttcaaactcctgaaagttggctagtccttgttcatatctaccccatacctgtgttaataccgtttacatttactctttcagacacaggggaacaaggtcctgagcaaaggaggacttggtatgaacaagtgggtttggtgccgccattgcttctggcttgggtctctgcaactttggtggagcttccaagagctccatgtggggacggagcattagatggttgacaacatctgtggtctgcaggagccactatgcggagggcccagggaagaatttgccattttcaatgaaaaacacgtggcagttactaattatgatgactttgtactgggatcgggatctgcggcacccttctttaaagtaaaacaccaactgcttaagaaataagaatgttttagtttatccattgaacagacatgaagagtgtttcaagagatgcaatccctttgaaaaatggatcaaactcttgaactcatgtagcatactagatatgtttgtgaataaactcatgacatgaaaaatcagtcaatcaatttagccttggacataaatagataatggcttctcattccccgtttacagtggcccctccttctcttgtcttttccaaatacaagaccgcttagatctttatcatcatcctgaggagctgatattcaagattatatgtaagacatggggaacttgaactcagaggggtttttttgtgtttgtgtgtgtgtgtgtgtgtgtgtgtgtgtgtgtgtgtgtgtgacaaggtctcactgctgcccagactgagtgctgtggcacagtcacagctcactgtagcatcaacctcctgggctcaagcgatcctcctacctcagcctcctgagtagctgggaacacaggtatgcaccagtatgctcggctaatatttttatattttgtagagacagggctttgccatgttgtccagactggtcttgaattcctggacacaagtaatcttcctgtcttggcctcccaaagtgctgggattacaggtgtgagccaccgtgcccagccagaattggagatttttaaatacagaaattctcaagtgctttgcccaggaagggctacatttgtcaacttttctggctgctggagcaggtcagagagggctaatattcctgtcagaggtggtagatttcctctgaccccatttgttcatctctacactttctgaagaaaagtcccttttcagatgtctatatatttttaaatattctcattatttagaaagctcctttctttatgttctgagtgaattactcccatgtgttaagagttgggaagtgataggaaaggtagggtccaaggaaagtagtcaaaattgatcaaggacccagctgaaagataaatgaagttgaacagttcacaaaagaggaaatatattgggctaaaagacacgtgggaaaatgttcaacttcactaataacaaaagaaatgcaaattttaagaaccaggtaccgtttcatctataaaatttgcaaaagttaaaaatgtgtggcctggcgcagtggctcatgcctataattccagcactttgggaggccaaggtgggtggatcatgaggtcaggagttcgagaccagcctggccaaagtggtgaaactccgtctctactaaaaatacaaaaaattagctgggcatggtggcaggcacctgtaatcccagctacttgggaggctgaggcagagaattgcgtgaacctgggaggcgaagtttgcagtgagccgagattgcaccactgtgctccagcctgggcaacagagcaagactccatctcaaaaaaaaaaaaaaaaaagggttgggggtggtgagaaaatacccagtattggcaagcatgcagtgtggtggctgtctttatgccctgctagtggtgggctaaattgatgccacttttagggaaaccatctggtgatgcgtatcaatcatattcctgttaaattatcctaagaaagttatccagaacataacacaaatttattcacaatgatgcagcgttatttataagaaaaaatgggaataacttaagtatcaaaaaatatgagactggttaaataaatgataatatattctcacagtagaacactaatgcaactgttgggaaagatgctttgtgggccaggtgcggtggctcacacctgtaatcccagtactttgggaggccgaggcgggcagatcatgaggtcaggagattgagaccatcctggctaacatggtgaaaccccgtctctactaaaaataaaaaaaaattagccaggtgtggtggcgggtgcctgcagtcccagctactcgggaggctgaggcaggagaatggcgtgaacccgggaggtggagcttgcagtgagccgagatcgcgccactgtactccagcctggtgacagagcgagactgcacctcaaaaaaaaaaaaaaaaaaaagatgctttgttaagttttctagtaccacgagaaaatgctttttttacaatccaggctggggtgcagtggtgcaatcttggcctccccagttcaaatgattcttgtgcctcagcctccctactgggattacaggtgtgtgccagcacacccagctaattttttaatatttttagtagagatgggtttttgccatgttagccaagctggtctcgaactcctggcctcatgtgatccacccacctgggtctcccaaagtgttgtgggccactgcgcctggcctattacaatgttaattaaaaggtgcaaaatacaaaattgtatttgcagtcatccctcagtagctgtggaagattggttctaggactccccctgtccccacagataccaaaatccacaatatacaagttccttctttttatgttgttgctttttttttttttgagacagagtttcactcttgtcgcccaggctggagtgcagtggcacgatctcggctcactgcaacctctgcctcctgggttcaagcgattctcctgcttcagcctcctgagtagctgggattacaggcaggtaccaccacacccagctaatttttgtatttttggtagagatgggtttcaccatgttggccaggatggtctcaaactgctgacctcaggtgatccccccgcctcggtctcccaaagtgctggtattacaggcgtgagccactgtgcctggccacaagttcctaatataaaataatgtagtatttgcatgcaacctactgacatcctcccatatactttaaatcatctctaggttacttataatacctaatgcaatgtaaatgctatgtgaatagtagttttactgtattgtttaggaaataatgacaggacaaaaaaacctgtgcatgttcagtacaaatgcagccatcctttcctttttcaaatattttcaatctgtagttggttgaatcccaggatgcagaactcacagttacaaagagctgactgtacattctaatctcagttatgttaaaaaataaaacgtagaaacaagaaagggataaaacatattaattcgttaacaatggttgtcttgaaataattggtaatttttttcttcttcccttttcctcttatttatctgtaataataatatactgtctttagaataaaaattgtatttaggcaggatgcagtggctcatgcctataatctcagcactttaggaggtcgaggcaggaggattgcttgagctcaggagtttgaaacgggcctgggtagcatagtgagactctatctctacaaaaaatttaaattatttatttatctgtgagacagagtctcactttgtcgcccaggctggagtgcagtggcacaatctcggctcactgcaaactctgcctcctggggctcaaacaattctcctgcctcagcctccctagtagctgggattacaggtgcacaccactgcgctcaggtaatttttgtatttttagtagagaggaggtttcaccatgttggttgggctggtcttgaactcctgacctcaaatgatcttcccgcctcaacctcccaaagtactgagattataggcatgagccaccatgcctggcaaaatttttaaaaatgttttaaattttattgaaaaatcatgagcagctacagtaatcaagtctgtatggtactgtatggaacagaccagaaagttcagaaataaactgttagctttatggtcaattgattttcaaaaagggtgctcagacaattcagtgaggaaaaaaatcatcttttcaataaattgtgctgggacaactggatatctacatgcaaaagaagaaagttggaccccttctttacaccacatacaaaaactaactaaagtggatcatagacctaaatgtaaaagctaaaactatgaaatttttagaagaaaacgagagtaaatctttatgatcttaagtcagagaaagtcttcttagatatgacaccaaaaacccaaacaacaacaaaaataaattggacatcatcaaaattaaatacttttgtgcttcaaaagacagaaacaagaaagtgaaaaaactcacagaatatgagaaaatatttgcaaaccatatatctgataagggacttgtatccaaaataaataaagagctctaacaactcaacaataaaaagataaatgatccaattgaaaaatgggcaaaagtccggtctcagtgactcaggcctgtaatcccagccctttgggaggccaaggcgggtggatcacctgaggttgggagtttgagaccaccctgaccaacatggtgaaaccctatctctactaaagctacaaaattggctgggcgtggtggcacatgcccgtaatcccagctcgttgggaggctgaggtaggagagtcgcttgaacccaggaggcagaggttgtggtgatccgagctcaccattccactccagcctgagcaacaagagcgaaactccgtctcaaaaaaaaaaaaaagaaagaaagaaagaaagaaaagaaagaaaaaaaaatggggaaagatttgaatagaaatttctgcaaagaagatatataaatattgctgccgtaacaaatgtagtggcttaacccaataccactttattatcttacagttctggaagtcaggagctcaacatgggtagaaatggaaagtgactgctaatgagtatagggctcctttttggggtgaggaaaatatcctaaaattaattgtagtgatttttttggtagagacaatgtttcatcatgttgcccaggctggtctcaaacttctgggctcaagtgatctgcctgcttccgtggttgcacagctctgtaaataaactaaaaaaccgttttgtatgtaccccatcttgggttgtttgggattttcttgtttgtttgttgttttgttttgtttttgttttattttgttttgttttgtgacagggtctcactttgtcacccaggcacatacaggctggagtgcagtggtaccatcacaactcactgaagcttcaacctcctggacccaagggattctcccacctcagcctcccaagtagctgagacacaggcatgcgccaccatacctggctaattttgttaagaaatgaggtctctctgtgttgcacagtctggtctccaactccagggctcaagtgattgccccacttccgcctctcaaagtgcgggattataggcatgagccaccacacccagcctgtatgtgtactttaaatgggtacattgcatggtatgtaaactacgtctcaataaagctgttaaaaaataacaaatgaggccagacgtggtggcttctgcctgtaatcccagcactttgggaggccaaggcaggcggatcacaaggtcaagagatcgagaccatcctggccaacatggcgaaaccctgtctctactaaaaatacaaaaacttagccaggtgtggtggcacgtgcctatagtcccagctactcgggaggctgagtcaggagaattgcttgaacctgggaggtggaggttgcagtgagccaagaccatgccactgcatgccagcctgggagacagagtcttactctgtctcaaaaaacaaaaacaaaaacaaataaacaaaaaaaacaaatgaatgactcctaagtaggatgctgtatcaatttaacaaaaacacaccacaaatggacttaaagaataaaggaaatgtattggctcatttaactgaaaagtatagaggaaataaagactttaggtgtggtacagtcaaaacctccttccccagcagttggagctccaactgtacatgctgctacacagttgagggagagtgaaatggatattgtggagacaacacccactatgaccatccactatggtcctaagggcaaagagaaaacaggtggctcacggctgggcgcagtggctcatacctgtaatcccagcactttgggaggtcgaggcaggcagatcacttgagtccaggagtttgagactagcctgggaaacatggcctgtctctataaagaatacaaaaaatttagctgggtgtggtggcacacgtctatagcactagcctgggcgacagagtgacaccctgtctctacattttttaaataaataaataaattgaaaaaatatatagtaaaaaagaagaaaacagaagggcaggcctggcatggtggctcattcctgtaatcccggcatttttggaggctaagatgggaggatcacttgagactttgagaacagcctgggcaacatatgaagaccccatcgctataaaaaaattttttttaatactttgggaggccaaggcaggcagatcacttaagcccaggagtttgagaccagctgggcaacatggtgaaaccttgtctctactaaaaaacaaacaaacaaacaaaacaatttttttaatcaaaaagaagggctaggcacggtggtttactcctgtaatcccagcactttgggaggccaaggcaggcagatcatctgaggtcgggagttggagaccagcctggccaacatggtgaaaccccatctctactaagaatacaaaaattagccaagtgtggtggcatgcgcctgtaatcccagctatgtgggaggctgaggtgggaggatcacttgagcccaggaggcgaaggttgcggtgagccaagattgcaccactacactccagcctgggtgacagagcgagactgtgtctcaaaaaataataataaaataaataaataaatcaaaaagaaaataaagaaagaaaacagaagggcaagttcaaagacaaatagcagagcatgtgtgtaccagtcataggagcaattctcaggagggcgaagccctctttagactaaaaagagaaacaactaaagactgtaataaagaacactgtcctttaggccggtcgcggtggctcacgcctgtaatcccagcactttgggaggctgaggcgggcagatcacaaggtcaggagattgcgaccatcctggctaacatggtgaaaccctgtctctactaaaaatacaaaaaattagccagacgtgctggcaggcacctgtagtcccagctactctggagaatgaggcagcagaacggcatgaacccgggaggcagagcttgcagtgagccgagatcgtgccactgcactccagcctgggtgacagagtgagactctgtctcaaaaaaaaataaaaaataaaaagacactgtcctttaaacacttcaaaagtgtttaggattgactgctaatggagtatgaaaatgttctaaaattagatggtagtgatggttccacaggcttgtaaatatactaaaaaagattgaggtctagcacggtggctcacacctgtaatcccaacactttgggaggctgaggaggtcagatcacctgaggagttcaagaccagcctgaccaaaatggcgaaatcctgtctctaccaaaaaatacaaaaaaattagccaggtgtgatggtgcacacctgaagccccaactactcaggaagctgaggtgggagaattgcttgaaccaggatgtggaggttgcagtgagctgagatcttgccactgcactccagcctgggcgacagagtgagacactgcctcaaaaaaaaaaaaaagttaatgatcgctgggtgcagtggctcatgcctgtaatcccagcactttgggaggctgaggcgggtggatcacctgaggtcagcagttcaagaccagcctggccaacatggtgaaaccccgtctctactaaaaacacaaaaattagccgggcatgatggtgggtgcctgtagtcccagctacttgggaggctgaggtgggagaatcacttgaatctgggaggcggaggtttcagtgagctgtgatcacgccattgtgctccagtctgggcaacaagaaagactctgtctcaaaaaaaaaaaaaaaaaaaaaaagattgaattgtacacttgaatatgtgtattcttttttttttctttgagacggagtctcactctgtcgctcaggctggagtgcagtggtgagatctctgctcactgcaagctccgcctcccgggttcacgccattctcctgcctcagcctcccaagtatctgggactgcaggcacctgccaccacgcccggctaattttttgtatttttagtagagacagggtttcaccatgttagccaggatggtcttgatctcctgacctcgtgatccacctgcctcggcctcccaacgtgctgggattacaggcatgagccaccgcgcccagccaagtatgtgtattctttaaatgatatgtgatggaccaggcacagtgtctcatgcctgtaagcccagcagttggggaggctgaggtgggagaatcacttgagcccaggagtttgagaccagcctaggcaacgtagtgagaccccatctctactaaaaaaacaaaattagctgtgcatgatagtgtatgcatctgtagtcccagctacttggaaggaggcaggaggattgcttgagcccaggtgattgaggctgcagtgagctttgaccgtaccactgcactccagcctgggagacagagtgacatgctgtctcagaaaaaaaaaaaaacaaacttaaataatatgtgaattctacttcaatgaagctggatttcatagtttagagcaagtaggtaagatattaatctagtgcttgggcacatggagccaggagaaaggagttaaatgtaaactgaagcccaaagtgtgggaaagatagtaagtgagcctctgtgtatttcaaggagttcaagactcttgggcccagataaattacctcctagggcactgaaagaacttgtaggtgtagtaattatttaaactaatttatgagaaattatggagaattgggtgagagaagaaaagttttggagacaagtacacatggatttttttttttttgagatggagtctcactctgtcccccaggatggagtccagtggcatgatcccgacttactgcaacctctgcctcccaggttcaagcgattctcctgcctcagcctcccgagtagctgggactacaggcatgtgccaccacgtccagctaatttttgtaattttagtagagatgggggtttcaccattttggccagaatggtctcgatctcttgacctcatgatccacccacttcggcctcccaaagtgctgggattacaagcatcagccaccgcacccagcccccaaacgtggatttatttattttgtgtgtttgtatatgtttagttttattgtaacaaaccaacttgtacatttttgttttgttttgtttttgtttttgtttttgagacagtctcactctgttgccctggctggagtgcagtggcatgatctcagctcactgcagcctttgcctcccgggttcaagtgattctactgcctcagcctccccagtagctgggactgcaggtgcacgccaccacacctggccaatttatttttatttttatttttatttttagtagagacaggatttcgccatgttggccaagctggtcccaaactcctgacctcagttaatccaccctccttggcctcccaaagtgctgggattgcaggtgtgagccactgcgcctggccacaaggcaacttgtacatttttaacgtttaaaactgagcatctgggccaggggttgtggctacctgctgtaatcccagccctttgggaggccccagctggaagatggcttgagttcaggggtttgagatcagcctgggcaacatggtgaaactccatctctacaaaaaatacaaaaattagccaggcatggtggcacacacctgtactcccagctactagggaggctgaggttggaggatggattgagcctgggaggttgaggcttcagtgagctgtgattgccttattgcactctagcctaggtgacagagcaagatcttgtatcaaaaaaagaagtaagtaggccaggcacggtggctcacacttgtaatcccagcactttgggaggccgaggcaggtggatcatgaggtcaggagtttgagaccagcctggccaatatggtgaaactccgtctctactaaaaatacaaaaattagccaggcgtggtgacacatgcctgtagtcccagctactcgggaggctgaggcagaagaatagcttgaactcaggagacggaggttgcaatgaactgagatcacatcactgcactccagcctgggcgacagagtgagactccatctctaaataaataaataaatgtaaaactttattttaaaagtgttatcttggccaggcgtcgtggctcacgcttgtaatcctagcactttgggaggccaaggtgggcagattatctgaggtcaggagttcgagaccagcctggccaagttggtgatctctactaaaaatacaaaaattagctgggcgtggcatgcgcctatagtcccagctactggggaggctgaggcgggagaatagcttgaacccgggaggtggaggttgcagtgagccaaggttgtgccagtgcaccctagcctggtgacagagtgagactccgtctcaaaaaaaaaaaaaaaatcaaaaattagcctggcatggttgtgcatgcctgtaatgccagccagctactcaggaggttgaggcaggagaatcacttgaacccaagaggcagaggttgcagtgagctgatatcatgtcactgcactccagcctgggcgacacagtgaaactccatctcaaaataaaagtgttatcttaacaatgtctgttaaacaatatcattaaatatgccaaaggagaagccatgttgtcaaaatgcctacttaacccaccgaaatatctcaaattctccctttgctgattttctataaccctgttttttaaaggtttttttctccctttttttttaatgagatacagtctcactcttttccccaggctggagtgcagtggcacaatctcggctcattgcaacctccacctcccaggtttaaatgattctcctgcccgagcctcctgtgtagcagggattacaagcatccgccaccatgcccggctaatttttgtatttttagtagagacagggtttcaccattttggccaggctggtctcaaactcctgacctcaagtgatccacccaccttagcctcccaaagtgccggaattacagatgtgagccaccgcgcccagtctcaattcacatttaactcccttctcctggcctttttttcctttttttaaacaagagaaagtagatggatacatgttggtaaatgctaactgtccatgttcacatagagacacagtgaactctctgagcccaatacacagagaaaggaggaaaaaagcaagaattctaagcataactacataggggcctagcacccccgagcttccagcagagcgaaggaagtaggtttttcttttcttccacagagcttggtggtgttgattccgtacagtttttgttcagacaggaagggataaaaatgaatttgggatggaaagggatagactcttttcccactctgttctgctcaaggtgcatccccccaaaataacacccatggtataaataaaagaaacctcaggaacagtgtgactgggcacaagagggaaaaaacaaaaagaccgcaacttgatcccagaaaatggggaacattttttaaaaggaaggttggaatccatcagtgttctattagccatctcctctttcatcctcctctcctttgtcagtatcttccaacccttcatcatcatcatcttcttctttttctttatcatccgtatcaggaaccaagtagagctgtaatgagtttggccaaatatcatctttgatgacctctcctaactctccagcacccgcatcagaatgatcagtgaaccaggtaaaaaagctctccaattcctcactctggctgtattctgtgtctgacttgaatgctttatcaaatcccctccagatttccatttgattgcagtggactttgaagatggatcaccactctcattcaggtgaaattctttggagaactttattttcatagtaagaattttcatcaaaacaaacatctattctgtaatctaataaatatcttcatattctgtcaattcaactctggtcaaataatgcagtgcctctttatcctcctccctaagcagtgtaaacacttgtggatggttgacaaatattgttaccccaaaatttgggattttggcaatcaactctgatctctttggaaaaaatggttggcggagtttgccatatttctttttctagcttcaaaatctcctcactggcttgttcattaagtctatttcattttgtactttatcaataagttcagttgcttccgctggtttttttctgtcttcttctgcaagcccagagagatggatgtcttctctggtctcagagcacaaggcagacttggtttcttcttttgaggcagtagtagagactggcatttcagggccgtgctgctagaaaagtccaacaaccagaccacgagtctcattgctcaacagaatgaagctcagaaaaccacccacagatttttttaaagtggtatggatagaatgaaagtgaaaggagtccttccagaacccttaataaaatcaagcctatttccaagaagataaattctaaaaggtagggacctcatctgtgtattcacgacagtaccctcagctcctaacaggccccaaatatttgtttaaggttgagtgttgactcctccagggttgaccacggagagagatccctggtgcacagtagaaagtggggaagtaagggtacaaggtgaatcgtgggcaaaaaagtcttggtgaaagtttgggttttgggaggttttcattgttattgttacaaattttggttttgaatttggttaaatgttttttatgcatctgagataatcatatggtttttctcctttattctattaacatggcgaattacgttaattgattttcaaatgttaaacccagcttgcattcctagaataaactcactttggaaggctgtgttatcctttttacatattgctgagttcaatttgctaatattttgttaacaattaactcaccagggcctaagattttaaatttcaaatccagtttatttaattgatataggactactcagatattttatttcttcttgagtcagtgtggtcatttgtgtccttccaggaatttattcatttcatttatgttgttaaatttatattgataaaaagttgttcataatgttctattatcttttcaatgtctgtagaaacaataacgaagtgccctcttttacttggaccaaaaactaaatcttgggataagagtcaaaacttggggctgccaggcacggtggctgacacctataagctcagtaccttgggaggctgaggcaggagaattgcttgagtccaggagtttgacaccatcctgggcaacatagtgagaccccatctctttaaaaagtaaaaagttagccaggcatggtgttgcaatcctgtcatcccagctactcaggaggctgaagtaggaagatcatttgggcccaggagttccaggctgcagtgagccctgatcctgccactacactccagcctgggtgacaaagcaagactctgtctctaaaaataaacacattaaatataaactacagggcctagcgtggtggctcacgcctgtaattccagcactttgggaggccgaggcaggcggatcactaggtcaggagattgagaccatcctggctaacacggtgaaaccctgtctctactaaaaatacaaaaactagctgggcatggtggcaagggcctttagtcccagctactcgggaggctgaggcagctgaatggcgtgaacccaggaggcggagcttgcagtgagccaagatcttgccgctgcacgccagcctggagatggtccaagtgcagtggtgttacaactaatttatcacaaccagtcacagatttatttattccttctccactccctactgcttcacttgactagccaaacaacaacaacaacaacaaaaaaccatggaattctaggcaaatcagttccacacatagcaattggctgctacgcctgttaattctcctgagctgctttttccctccgttgccagccttagaggatcagttttttatttaacgttgttaagaagaaaggggctaggccgggcgctgtggctcaggcctgtaatcccagcactttgggaggccaaggcggggggatcacgaggtgaggagatgaagaccgtcctggctaacacggtgaaaccccgtctctactaaaaatacaaaaaattagccgggcgttctggcgggcacctgtaatcccagctactccgggggctgaggcaggagaattgcttgaacccaggaggcaaaggttgcagtgagccaagatcgtgccactgcactccagcctgggcgacagagctagactctatctccaatccaaaaaaaaaaaaaaaaaagaagaagaagaagaagaaaggggccaggcgcagcggcttatgcctgtaatcccagcactttgggaggccaaggcgggtggatcatttgaggtcaggagttcgagaccagcctgactaacatgatgaaaccccgtctccactaaaaatacaaaaattagccaggcgtggtggcatgcacctgtaatcccagctacttgggaggctgaggctcaagaattgcttaagcccaggaggcaggggtttcaggaagccaagatcatgccactgcactccagcctgggtgacagagtgagactctgtctgaaaaaagcaaaacaaaataaaacaaaaaagaagaaaggggccaggcgcaatggcacacactgtaaccccagcactttgggaggctgaagtgggcagatcgcttgagcccaggaatttgagaccagcctgggcaatatggcaaaaccccttctctacaaaaaaaaaaaaaaaaaaaaaaaaaaaaaattagccaggtgtggtggtgggcatctgtggtcccagctacatgggaggctgaggcatgaggattgattgaacccggaggtcaaggctgcagtaagccatgttcgtatcactgtactccagcctgggtgacatagtgagaccctgtctcagaaaaaaagaataagaagaatgagagaggtagactccagaaatgacaaatggcaagctcaatgttgatcttttttttttttttttttttttttttgagacggagtctcgctctgtcgcccaggctggagtgcagtggcgggatctcggctcactgcaagctccgcctcccgggttcacgccattctcctgcctcagcctcccaagtagctgggactacaggcgcccgccactacgcccggctaattttttgtattttcagtagagacggggtttcaccgttttagccgggatggtctcgatctcctgacctcgtgatccgcccgcctcggcctcccaaagttctgggattacaggcgtgagccaccgcgcccggccaatgttgatcttaagtgaaattctagaatggaatttgtgggcaacacaaaaaaaatttggtggttctgagagctgtcacatattcactaagagcaattttgctgaactttatttccttcttgtcaaagtatctgtctcccttgcacagtcagattgtttacactagtagttaccgagggccaatttcgtacccagcattgtgctaagagtgtagatagatacaataggggtgaaccaaaaggacatccccccttcccttacaatgtagtgagggacaattgttaaaccaataagcacgtgaataaatataccactataaactgtgagaaggggtatgaaggatggtagaatggtgggagagtttcacaggaagatctgatttagatttggcagcaggcagaaggttggtctaaggaaagcctttaagaggaactcctatttaaagataagtaagaggccgggcgtggtggctcaaacctgcaatcccagcactttgggaggccgaggtgggtggatcatgaggtcaggagtttgagactcgcctggccaatatggtgaaaccctatctctactaaaaataaaaaataaaaaaaaaatagccgggcctggtggtgcatgcctgcagtcccagctactcgggaggctgaggcaaaagaattgcttgaactcgagaggcagaggttgcagtgagccaagatcgcaccactgcactccagcctgggcgacagagtgagattccgtctcaaaaataaataaataaataaataataaaataaaataaagataagtaagagttagccagggaagtagtagcagaaagagtattcttttttttgagacagagtctcgctctgttgcccaggctggagtgcaatggcacgatttcagctcactgcaacctccacctcctgggttcaagcaattctcctgcctcagcctcccaagtagctgagattacaggcacacgtcaccacgcctggctaatttttgtatttttagtaaaaacggggtttcaccatattggccaggctggtcttgaactcttgaccttgtgatccacccgcctaggcctcccaaagtgctgggattacaggcatgagccaccacgcccgaccaagagtttttttttttttttctgcaatggagtctcgctctgtcgcccaggctggagtgcaatggctcgatctcggctcactgcaatctccacctcccagcttcaagtgattctcccgcctcagccttctgagtagctgagattacaggcatgcatcaccatacccagctaatttttttatttttagtagagacagggtttcaccatattggccaggctggtctcaaactcctggcctcatgtgatccacctgcctcagcctcccaaagtgctgggctgaaaaatattctgagcagagtaaacagcatgggcaaagaccttgagtcaggaaagtgatgagtttgaggaactgagagaaggctgatgtcactggaaagcagtaggagagtgagagttggagctggagggtgaacaggtcaaaattatgcaagctttaaagggcacaaagaggttggcttttatcctaggggtgctagaaagtcatcaaagtagtttgtgcaggaatgtagcccaaatgatccagttttggtttggaaaaatttaaacataggcagtggctcatgcctgtaaccctagcacttcgggaggccaaggcaggcaaatcagttgaggtcaggagtttgaaaccagctggccaacatggtgaaatcctgtctctagtaaaaatgaaaaaattagcctgatgtgtcagcaggcacctgtaatcccagctactcaggaggctgaggtacgagaatcacatgaagcaggggggcagaggttgcagtgaggcaaaatcgtgccactgcactccagcctgggcaacagagtgagactccgactgaaaaaaaacttttttttaacttatatgagaatagacacggttatattatagcacccaaaatacccatcaatggcttcaaattatcattttatggccaatttttaggatttgggaataaaatagaaattcccaggaattctcagaaattcttgatattaaaaactattccgtattttcataacactttatttaatgttttaaatgttagtatgcaagattgtcaaagaaaaagactttttttaatttttaaatttttttgagacatggtctctctctgtcacctaggctggagtgcagtgttgcgatctcagctcactgcaacctctgccttgtgggttcgagcgattctcccgcctcaacctccctcccaaagtgctggaattaaaggcatgagtcactgtgcccagccaaaaaagttaacattcttaaaataaaaaacataaacatgcaggctgggcgcggtggctcacgcctgtaatcccagccctttgggaggctgaggcgggcggatcacaaggtcaagagatcgagaccatcctggctaaccccgtgaaaccccgtctctactaaaaatacaaaaaattagccgggcgtggtggcgggtgcctgtagtcccagctactcgggaggctgaggcaggagaatggcgtgaacccaggaggcagagcttgcagtgagccgagatcgcgccactgcactccagcctgggcgacagagcaagatccatctcaaaaataaataaataaataaataaataaataaataaataaataaaataaaaattgccaatgagcattattgactagcattcaaataatctaacattgagctctcctaacactatacagaatcccagattaaaattcccaatttttgtatttaccaaaatttgttacttcttggatcaccactcattggatttatataaagcaaactgtgcatataaactcattactatttattttacttgcagaaatgcctgtgcttagcagcagacagggccatgagcacatacttctgacatggcagtgaaggcgaattgacagggatgggttcatgctatgttttggagtgggcaacaccatcaggatattacaactcttttttaaaaaaagttttaattgtttaaataaatttttaattttaatttttgtgggtacatagtaggtgtatatatttatgggatacatgagatgttttgatataggcatgcaatgattatacaacccattttaatagtctcaatgcgctccatcatcattttgttgacacagtaacagtctgagctaacaggatgggtattagaaactaagaaggaaccgggcgcagtggctcacgcctgtaatcccagcactttgggaggccgaggcaggtggatcacctgaggtcaggagttcaagaccagcctgaccaacatggagaaaccccgtctctactaaaaatacaaaattagctggggtggtggcgcatgcctatgatcccagttactcgggaggctgaggcaggagaatcgcttgaacccaggaggcggaggttgcggtgagccaagatcgtgccattgcacccagcctgggcaaaaagagcgaaacgccgtctcaaaaaaaaaaaaagaaaagaaaaagaaactaagagggaaataaggccgggcgtggtgtctcatgcttgtaatcccagcactttcagaggccaaggagggtggatcacttgaggccaggaattcaagaccagtctggctaacatggtaaaaccgcatctctacccaaaatacaaaagttagccaggcttggtgggacacgcctgtaatcctaactactcgggaggctgaggcaggagaatcacttcaaaccaggaggtggaggttacagagagctgagattatgccactgcatcccatcctgagtgacagagactctgtctgaaaaaaagaaagaaagaaagaaaagaaactaagagggaaatgagattggatagttggggtgggtgaggactctcagaaaggagggagggcttcccagcagaagaggcgtgttttcgtgcgtaagaagtggctggggaaagcgaaagcagtgggggcacccatgatgagactggctggctctagaaacattagtgggatttcacccacacttgcttgggtaactttctgttgtcattgggaagccagtgggactttctcgtccaagatgaaccagggcccatacacttgccactttcacttgttcctagaggctgtgtcatgtcttggctgcctcagggtgcagggactatgctcatatagtaggaaggtaacggcatacacaaattaggtgattacaggtctcacacttgtcagttggctccattcaatttcatacttggttctttctcttccatgatctctattttgtttcttgaacagaccaggactctgtaagctgaaacgtttggtaaattcccttccttgccagtttacactgactttgtacccacagttcaaggctaaatccctttttgtctgggctagtggttgccaaatccctttttgtctgggttagccatttcatgtagagactgcttctctacctatacgcttattcaaatgcagtagtgaaacaaaatcaatgcacagccatacaattactacatagcctgtgtaaagaatgatgcagatctatttatatacaaatatggtaagctccataatatattattagatttttaaaaagtaagtctccagacaacatttatagtagtgttttgcgtgtgtgtgtttataattgcatagatatagttctggaaggatacatggtaaactcaactctaacaagtgtgtatatgacaggaatgaaataactctactttttagtttgttttaaaagtattttaatttgcaagcatcacttctataatgtgaaacaaaaattaaaaacctcaaaccgttgctcttcttggagtcacttgaattggtagccctgaagaaaattcctaaattagactttcttctgttcttgactgaacgaggatgaatgagtcacccaatcctgtgccaggtacaggaataaatgctggacagttacagatgaaagagagcatgttgccctttaaggacttcaaagtttacagagagaccagaaaacaagaaattaaagtacagtatgatatatgccacagagctataccttggaaagaaaaaggatggacagcacagactttaaagcagtaacaggaggtgggtaggaaagccttccagagaaggtaagaatcgagaggagtcttttattttccctgttactttattattaaaaaatgtcaaacataactgaaaggttgaaacatctgcagatccaccacctagattcaacgattgaacattttgttgtattcactagatatgtaatacaaataaacaaatgcaaagccatttgaagtttcacccctaaatatttaaaccccaactcctaagaatgacattatcttacataaccacaatgccgttatcaaacataaaaataacattaagggctgggcatggtggctcacgcctgtaatcccagcatggtgactcaggcctataatcccagcactttgggaggctgaggcagtggatcaccaggtcaggagttcgagaccagcctggccaacacggtgaaactccatctctactaaaaatacaaaaaattagccaggtgtggtggcaggcgcctgtaatcccagatactcgggaggctgaggcaggagaatcgcttgaacctgggaggtggaggttgcagtgagccaagactatgccactgcactccagcatgggagacacagcgagactctgtctcaaaaaaaaaaaaaggcaaaaatgaacccccccgattagctgggacaacaggcatgccccaaaacacccagctaatttttgttttttaagtaaaaatgaggtttcaccaaattggccaggctggtctcaaacttctgacctcgtgatccacccgcctcagcctcccaaagtgctgggattacaggcgtgggccaccacacctagccacaagtattattctctaaatgtcattgtggttagatgtggtgacagaagtgttagtgagctctagcttgtccttgctttgctctgatcagtgtccagaaatgctttccaattcctgaccctgttgaccaccagtgaccaccagacacttggtgatggatccacagaggtggcggctgcccagatggctctccaggagccttctcatcacagccccatgtcagtggccagatgcacttccctccccacattggtgactcctcttttgattctctgactaacctcttggtctttcctttccccagcttcttctacaattgtgtaaagcatagttcccataataaattccttatctcatcattcatgaaggttctacctccctgactgatacacttactggtactggccgtggtttcaggggacagatcattaaggataggaattggaaactggttctctgacctgattaaacttaagtgcattcatgattgttgccagcagtaaacttaaattcttaaactctacctgtaatcacttgtgatacatgcttatagacggcaaagctttgggtagccaaatatttgctgctgtagaacattttagtagaaataggaatgtaatgaggaatgttggttgcttctacatatggggaaagtttggagaaagaaaatgatgagctaaaggctttaaatttccatctcaagttctggaaaatggaccaaaaaacttgaagactgcctttaaaaaaaactctcatctctgatagcctcaaggtcaagatttctgatcaccaaacactaagtgtccacttgcagcagactgaatttcaacgcaaagtgaattcataacctaccagggtgtcttatgttcaaaataagacattgattggaaaggagtaagaccctgagtcttaggatacagacatacggatggattcctatgaggtcaaagaccttaaaccaagcttgaccaacctgtggccctgcaggctgcatgtggcccaggatggctttgaatgtgcccaacacaaattcataaactttcttttttttttttttttttttggacagagtctccctctgtcacccaggctggagtgcagtggcacgatcttggctcactgcaacctctgcttcttaggtgcaagtgattttcctgcctcagcctcctgagtagatgggattacaggcacgcaccaccacacccagctattttttttgtatttttagtagatatggggtttcaccatgttggccaggctgatctcgaactcctgacctcaggtgatcacccgcctcaacctcccaaagtcctgggattataggcttgagccaccacactcggccataaactttcattatgagctttggccaggcgcagtgggtcacacctgtaatcacagcactttgggaggccgaggcgggtggatcacctaaggtcaggagttcgagactagcctggccaacatggtgaaaccctctctccactaaaaatacaaaaattagccaggcgtggtggcggtcgcctgtgatcccagctacttgggaggctgaggcaggagaatcgcttgaacccgggaggctgaggttgcagtgagccaagacagcaccactgcattccagcctgggcaacaagagtaaaactgtgcctcaaaagaaaaaacaaaaacaaaaaacaaaaaccacaacaacaacaataaaaaacattatgaggttttttgtgatctttttctttctttttctttttctttttttttttttagctcatcagctattgttagtgtattttaagtgtggcccaagacaattctttcaatgtgccccagggaagccaaaagattggacacccctgccttaaaccctaaattcagctaaccctccttagccaaaaaaaagtgaccttcttctctatctgcagttaatcttcccttacctaaagaacctgggatgacctccccagagctagtggcctttcaggggactgtgatcctcctaggaacctaacccttccacctcttttagatctgtaagctcagagattcaagtcatagcaggccccagggtgactcatgaggaaataccatacaaaccaaaagaatattgagagtttgtcaatgtatacattgcttcatgttttttttttgacatagtttcatatttacagcaaagttataagaatagtacaaacaattccttttatattttaccaagatcctcaaatgctgatttatactgactgaaactcagggaataggtaggggaatagatcttgaaagagtgggatcaggatggaagaaatataattttggatttggataaatttatttatgtatttatttattattttttgagagagagtttctctctgttgcccaggctggagtgcagtggcacaatcttggctcactgtaacctctgcttcctgggttcaagtgattttcctgcctcagcctcctgagtagatgggattacaggcgcctgccaccatgcccggctaaattttgtatttttaatagagatggggtttcaccatgttggccaggctgctctcaaactcctgacctcaggtgatccactcgccttggcctcccaaagtgctgggattacagggtgagccaccacgcctggcctggatgaatttattaataagaatgcaaaccctaaaaagcctttatcagccaggtgcagtggctcacacttgtgatcccaacactttgggaggctgaagcaagaggattgcttgaggccaggagttcgagaccagcctgagcaacatagcaagatcccatctctacgagaaaacaaaataaaataaaataaacctttctggctggggagagactgcccctccctgggctagccagttcttagagatagcaaagagctcagccagaagcatgtctttgatatgcaaatgaaccagccccagagccacaccccctctatctgtcctacacacccccagaggcaaaattcctccgcccagggccaggtcccagtcaattagggaccaacctataccccaaagccactgaaattattcaaactagtcaatactaaaggttcaaccccaccctaccttgcctttccttcaaaaccccccaccccaaagagcagtagcctaaaccttccccacacttctgtcttctgccctttgaccaccctgtgtcttttccttggggccctgcatgcttcctgtccctaggatccaagagtacaataaactctgttttcctgagcctctcctgtctcttgtggccatagcttttatgagactggccatctcattaaagaatgcaaagcagccaggcacacacctggaatcccagcactttgggaggccaaagcaggaggaacacttgaggccaggagtttaataccagcaacatagtgacaccctcatctctataagaatatattgtggcgcacacctgtagtcccagctactcaggaggctgaggtagaaggatcgcctgagcccaggaggtcaaggctgcagtgagagttaggttcatgccattcattgcacttcagcctgagcaacagagaaaaatcctgtctctaaaaaaaaaataaaaataaataaatgtaaaaaaaaaatttaaagaagcaaaatgtgtactaagcagagattctgaatttaaggtatctgttcaagttgtttgggaatggctttagaagtttgctttttttttccccttgggacagagtctcactctgttgcccaggctggaaggcagtggcaagacctcggctcactgcaacctccatcttccaggttcaggtgattctcctgcctcagcctcccaagtagctgggattacaggcgcgcgccaccacgcccggctaatttttgtatttttagtagagacggggtttcaccatgttggccaggctggtctccaactcctgacctcgtgatccatccccctcggcctcccaaagtgctgggattacaggcgtcagccaccgcacccggctgacttctgacaataaagagtaagagcccttcaatcaattcttagattagagacagtccccaaacccagtccccttgaatgaaggaaagatcctttgaggaaggatttactacactgtcaaaaagttacacggtaaatcttcttagcatttcctcaaagagacctgaagccataacgcagggtgactgtgctttgagaaggagaaatgaccagatacttaggagttagtaaacctcggctctgaactggtgctaatccccggagaaccaaaatggcactgtgtcccattgtcagagcagaggctcatggaagttagatgatctatgaagttttggcttggctccatctcacagcaagcccagtagttcccagaactcatcgcatcattatttccccagttccagaatgcacaggtgggtatacattgcagtttagatatattcagtaggtgtatgagtagacatactcaacaacatactctttttttttttttttttttgagacggagtctcgctctgtcacccaggctggagtgcagtggcgcaatctcggctcactgcaaactccgactcccgggttcatgccgttctcctgcctcagctgcccaagtagctgggactacaggtgcccgccactacgcccggctaattttttgtatttttagtagagatggggtttcactgcattagccagggtggtctcgatctcctgacctcgtgatccacctgcctcagcctcccaaagtgctgggattacaggcatgagccaccgcgcccggcaacaactggtagacttcttgtattggttctctgacccatggcacgaaggctatcatgataaaaaaggccaagtggaatccactagaactgtgtctacatactaaaatagtaaaccaaaaacagtatcacatttctggaaggcttgatgagattagtgccactaacaaggtcttgaaagacacagaggtggtaattcctaccatatccctgctcaaatcacctgtttgcctgtcagcagactgaaggacacaggagaatgaaagtgggttatccacagccttgtaactccaattgcagctgctgttccaggtataatttcatcgctaaagcaaatcaacacatcccatggcacttggtcgctttttctgttgtgttttgttttttgagatagcacctttctgtgtcaccaggactggagtgcattagcacaatagttcactgcagtctccacctcctgagttcaagtgatcttcccacctcagtctcccaagcagctgtgactccaggcacacagtacaagttgttgctgcttctcggcaggatgcctcagttcctcaccacatgttcctctcctcagaccagattatgacagaggttagagagtgcatggagccctgaggtagcgacatgaaggtgtactgcagccctgccaactaaaagaaaactgcatctggtggtcttttctaaaaggtatagagtagaaagcatttcatagatcaattgcaaaccaagtaccacggttggccaggtacagtggctcatgcctgtaatccagccttttgggaagccaaggcaggaggatctcttgagctcaggagttcaagaccagcctgagcaacatggcaagaccctgtctgtacaaaatattttttttttgagacggagtttcgctctcgtcgcccaggctggagtacaatggtatgatctcggctcactgcaacctccgcctcctgggttcaagtgattctcctgcctcagcctcccaaatagttgggataacaggcacctgccaccacgcccagctaatttttgtatttttagtagagacatgtttcaccatgttgatcaggctggtctcaaacccctgacctcatgatccgcccacctcagcctcccaaagtgctgggattacaggcgtgagccactgcgcctggccaaaaataattttttttttaattagccaggtgtgatgttgcatgactatagtcccagctgcttgggaggctgaaatgggagaatcacttgagcccaggagttcaaggttttggtgagctgtgattgagccactgcactccagcccatctcaaaaaaaaaaaaaaaaaaaaaaaaagctttcacttaaatatttttaggaaataaaaaaatgagctaggcatggtggtgggcgcctatagtcccagctactcaggaggctgagcaggagaattgcttgaacctgggaggcggaggttgcagtgagccgagatcgcgccactgcactccagcctgggcgacagagtgagactctgtctcaaaaaacagaataaaataataataaactcattgtgtgtcaacataaataacatacataaataacttttgctagtatctgaatgttggcgtactccccaaaattcatatgttgaaacctaatccccaaggtgatgatattaagaggcggggtgtttgggaggtaattaggtaatgaaggttccacccttatcgagggattagtgcctttgtaaaagaggcttgaaggagcttccttgctcctcacaccttgtgaggacacaaagaaggagccatctatgaggaacaggctttcaccagacaccaaaattgctgacaccttgatcatggacttcccgatctccagaattgtgaaaaataaatttctgttgtttatatattactcagcctaaggtattttgttatagcagcccaaacatactcaaacacttttatgaaacacaactacatttcaaaaggaaaaagaagttggtgagaaaagagcagctttgttttacatttttacaaatcttattcatctctggcttcacagaagacagctggattctcataactggtgctgcatgtagtctagtgtgatatcagtcattctgtagcctctggaacattccacattttgtgatagaacaagagtgaaaatggcatgtaagcactataacagttcacagataattttttattattattattttgttaagatggagtcttgctctgttgccaggctggagggcagtggtacgatctcagctcattgcagcctccgcctcccggattcaagcaattctcctgcctcagcctcctaagaagctggaattacaggtgtgagccactgtgcctggcctaatttttatatttttagtacagatggggtttcaccatgttggccaggctggtcttgaactcctggcctcaagggatctgcctgccttggcctcccaaagtgctgggcttataggcatgagccactgtgctcagtccaaattttttttcttttcttttctttttgagacagagtttcactatttttgcccaggctggaatgcagtggcgcgatctcggctcatcgcaatctctgccttccaggttcaagcaattctcctgcctcagcctcccaagtagctgggattacaggcatctgtcaccacactcggctaatttttgtattttcagtagagacggggtttcatcatgttagtcaggctggtcttgaactcctgacttcaggtgatctgcctgcctcggcctctcgaagttctgggattacaggcgttaaccaccatgcccggcttattttcttttttaaaaaaaatttttgggaccgggcgcggtggctcacgcctgtaatcccagtactttgggaggccgaggcgggtggatcacgagatcaggagatcgagaccatcctggctgacgcagtgaaaccccgtctctactaaaaatacaaaaaattagccgggcgtagtggcgggcacctatagtcccagctgctcaggaggctgaggcaggagaatggcatgaacccgggagttggagtttgcagtgagccgagattgcgccactgcactccagcctgggcgacagagcgagactccgtctcaaaaaaaaaaaattttggggctgggtgcagtggttcacgcctgtaatcccagcactttgagaggccaaggcgggtgtatcacctgaggttgggagttcgagaccagcctgacccacatggggaaaccctgtctctactaaaaatacaaaaattagctgggcatggtggcaggtgcctgtaatcccagccactgggaggctgaggcaggagaatctcttgaaccggaaagacagaggttgcgttgagctgagatcgtgccattgcactccaccctgggcgacagaacgagactccgtctcaatcaatcaatcaatcaatcaatgaaaatagtttagatttcacagacccgctgaaagggtctctgggacctctgatattcccagaccacactttggggacccctgttgtagcattatgccagaggactctgcttggtcctgttcagcattctcactacctgctaggacaaaataatcaatgtttaccactttggcagatgatgcaaactgggaagggaattattacaaaagatgacagaattaaaacttttaattatttcagctgaccagaatcaaacagaattaaattgtatgtgggatatcttgcatttacgttttgctttattttaaattagttgcacgtgtactagaagcatgggatggaaggaactggccagatagcagtttgtatgaaaaagatctggtggtttaggccaaccacaagctaaatatgaaccaacagcttgtaacataatgtcaagaagtgtaaccattgaactgggacagacgggctgagggttacttggaggaggggtgggtagaggagggagtagttacattttctttgctccagccattctcacatttgctctgactctctgaacactgcttgcccccagcagtttgctctgtcaagaggcctctgtccaggggtctgcttgcttctgtaaaacactagagctcaatctcagcatcacttgcagtcttcttcaacatcaccctttggaacttggcatggccacctgggactcaactcttcctggcctggcccacaggaagaacgggtcatggcttcttcctgcttgtcgccaagacggtgtctttgtgccttgtgaaatgattccatcccttccctcttgggtcaagagagaagttcctcccaagatcagcaaggatggccccgactggcacacacttcaagaaggtgatgatttctcctattctgctccggtctaagtcagtcaagaatggcattctaatcttgttaccggaaaggggtcccgatccagaccccaagagagggttcttggaccatgcgcaagaaagaatttgaggcaagtccacaaagtgaaagtccacaaaaagaaagcaaaggaataaaagaatggctactccataggcagagcagtggcttgagctgctcgaccgaggatacttactgttacttcttgattatatgctaagcaaggggtggattattcatgagttttctgggaaaagagtgggcaattcccagaactgagggttcctcccctttttatttttttaaatttatttttatttatttatttattttatttatttatttatttatttatttatttatttttatacggagtctcgctctgtcacccaggccggagtgcagtggcgcgatctcggctcactgcaagctccgcctcccaggttcacgccattctcctgcctcagcctcccaagtagctgggactacaggcgctcgccaccacaggctaattttttgtatttttagtaaagacgaggtttcaccatgttagccaggatggtctcgatctcctgacctcgtgatcaacccgcctcggcctcccaaagtgccgggattacaggcgtgagccaccgcgccggcctcctcccctttcgagaccatatagggtaacttcctgatgttgccatggcatttgtaactgtcatggcgctggtgggtgtgtcttttagcatgctaatgctttataattagcgtataatgagcagtgaggacaaccagaggtcactcttgtcactatcttggttttggtgggttttggctggcttcttcactgcaacgtgtgttttttgtttgtttgtttgtttgtttgtttttgagacagagtctctccctgtcgcccaggctggagtgttcacagcaacctccgcctcccgggttcaagccattctcctgggttcaagtgattctcctgcctcagcctcccgagtagcaaaaggcgcacgccaccatgcccagctaatttttggtatctttagtagcgatttcaccatgttggccaggtcgaactcctgacctcgtgatccgcccgcctcggcttcccaaagtcctgggattacaggcgtgagccaccgcgcccagccacctgcaacatgttttatcagcaaggcctttatgacccgtatcttgtgctgacctcctgtctattcctgtgactagaatgcctagcctcctaggaacgtagttcagtaggtctgagtctcattttacccagcccctattcaagatggagtcgctctggttcaaacccctctgacagtctgggaaaattactcactccattaatgacctgaaaaaattccagaggatgatggaggcagagaataggctctggagtcaggtgtaggtacaaatcccttctctgtcacttgccaaatgcatgcccactgcacaagttacttaaactctatgaacctcagtttgctcatttcatttatataatgaaagtaatattgggtattatgaaggctgagtgagataattcatatcaagtgcttatcatagtatctggcacataataatcatttattaaatattaattgtataaattgtattttgtctcaatttttttttttttttttagatagagtctctctatgttgccaggctggagtgcaatggcatgatcttggctcattgcaacctccgcctcctgggttcaagccattctcctgcctcagccgcccgagtagctgggactacaggtgtgcgccaccacacccagctaatttttctatttttggtagagatggggtttcaccatgtaggccaggatgatcttgatctcttgacctcatgatccacccctgactcggcctcccaaagtgctgggattacaggtgtgtgccacctcacccggccaattttttttttttttttaagactgagtctcactctgttgcccaggctggagtgcaatggcgtgaccttggctcactgcaacctctgcctccaaggttcaagcaattctcctgcctcagcctcccaggtagctgggattacaggcacgcaccaccatgcctggctgattttttttttggtatttttagtagagacggggtttcgccatgttggccaggctggtctcaaactcctgacctcaggtgatccagccacctcagcctcccaaagtgctgggattacaggcgtgagccaccattcctggcctgtatcaaaaattttaaagggaaacctgatccgaagaggcacctttctgcctacaacacaggccctttcatcagctgaccacaggaggggtgctccatggagccccagggccacaggcatctccatttcagaagaggagttctgccctacaggtacataactaaaagtcccttccagagggttttcctagaatgaaaatggattaacttcagctttgaaatgacaaatttcatttcctctccattcctataaaagcttcaaagatttcagggtcaattttctgttggggctcaagctccaagggtctgtgtgtgtgcatcccctggattccccaagaagaagaacccggcccaagacctccatgcagccaagcctgtctctaccaaaagccaaagcttgggcgagaatacagatggaggctcatagaccatatacctgatagttacaagttataaagagactattagaccaaatatggtttatcctcctgtgatattctgaaatatatatttggtctttatcaccatttcccagcatacaactcctaaaatcctgggaatctacaaagtgctgtgttttgttttttgcttttttgttttgctttttcttttgtgagacggagtctccctctgttacccaggctggagtgcaatggcacaatctcactcaacgtccacctcccggattcagatgactctcctgcctcagcctcccgagtaactgagattacaggtgcccgcctgtcaccaacatggtgaaatcccgtctctactaaaaatacaaaaattagctgggcgtggtggtgtgcctgtaatctcagctactcgggaagctgaggccggagagtcccttgaacctgggaagcggaggttgcagtgagccgagatcacgccactgcactccagtctgggtgacaagagcaaaactccatcttggaaaataaaaaataaaaaaagaactaggaagccagctggaatttagaattcttggactcctcagtttctcctcggaatgtggaagtgcagagaggtctggcctgtcacagtcaagtcccgctcttccattctgtaaccgcccaaggggttcaccttgcctgctgccaattaatcagagctcttttatgtataaacatcacacacacacacaacacatataaatacagacagacagaagattcagcacttgtaagatttttcatttgccagtttcttaattggattactgagagtgatttaatttatacttcaaaaagattactcttggccgggcatggtagctcatgactgcaatctcggcactttgggaggccgaggaaggagcatcgcttgagaccaggagtttgagactagcctggccaacatagtgagaccctgtctcaaaaaaaaaaaaaaaaaaaaagatgactctggctgctgtgagcagaaaggattgtggggtgcacagtggaagcagggagactagctgggaggtaggggcagcagtcccagagtgagagaatgatggtctggactaagatcagggctaagatcaggtctggactaagatctccctgtggccagggagaaagtgcacgaatggaggcagcatctgcgggacttgctgttgggttccatgtgggcgaatatgaggaagaaagagatgtcaagaataactggcctcttctctccagtgatgaccacatcctgtctgtcatagctgcctttgccatatgtggtccctataacatatttaaaatgttggtgttctcaaatttgttgatgtttgcctttgttatttttttcattatttttaaaatctcaagtcatttctcatttcaaaacctcctattatttggccggctcagtgggtcatgcctgtaatcccagcactttgggaggcggaggcgggcagatcacttgaggtcaggagttcgagaccagcctggccaacatggtgaaaccccgtctctactaaaaataaaaaaattagccaggtgtggtggtgcatgcctataatccaagatactcgggaagctgaggcaggagaatagcttgaacccgggaggcggaggttgcagtgagccgatggtgctactgtactgtatgggtgacatacagagcaagactctgtctcaaaaataaataaataaataaactctcatattatttacctataattttttctttttttaaattaaaaattaattttggtataagaaatattcttcaaactactggtagctattcactagtgagttattagatcaatttactgggcagacaccagaattttctttttaataatataggaatagaatagaatagaatagaatagatcagagtccatctgacataataaggataaatattgctttataaacttttgttttaattattaatttatattcaggcgagatgttccacatatttcttactgtgggtcatagtccaaaaaggtttaaaagcctctttataaaatgaaataataaaatctggttattttagtccaaaactgtaagcaattttcccagtattattgaaagactagtcttctctttcaccactgatttatgagtccttctttagcatgtattacattttggggtttttttgagacagagtctcactttataccccaggctggagtgcagtggcacaatcttagctcactgcagcctcaacctcccaggcttaagctgggactacaggcacgtgccaccatgcctggctaatttttgtattttttgtacagatggggtttcgcgacgttgcccaggctggcctgggactcctgagctcacgtcattctcccacctgggcctcctaaagtgctgggattacaggtgtaagccaccatgcccagccatgtgtatgaaattctaatacaacatacactttttaagcacttcctgtatgccctatatatgttaggcatggggaaaatgacacaatggtgagtacaaacatagactttctctgcactcctggagcttatggaaatgctgaggtctgtttctgggttatctgttctgttccattggtctttctacagatttttgcccagtggtgcagttgttatcactgtaatcgtcatttgttgaacaactgttatgggccaggcattctgctgagtgtttgacatatactatttcctttaatactcataaggatgctgtaaatgatattcttactcccattttacaggaggaagaaacagaggctacgagatgttaggaaggtttcccaagatggcagccttagtctgctcgggctgccatacaaaatactacagactgagtggcttgtacaacagaaatttatcaatatcttctcacagttctagaggctggaaggttctggcagggttcagctttgggcaagggctttctccctggtttgtagatggccaccttctcgctgtgtcttcatgaagtgccctttcctttgtgctgggcagggggtggggaaaggagacggggaggagaaggggagggcctcaacatatgaatctgaggggacaccatgcagtccatagcagtgacatgttcaggaagtggcaaagtcagattcaaacccaattttcttcttttttttttttgagacggagtcttactctgtcgccctggttggagtgcagtggtgcaatcttggctcactgccagctctgcctcccaggttcacgccattctcctgcctcagcctcccgagtagctgtgactacaggtgcccaccaccacgccgggctaatttttttttttgtaatttttttagtagaggcggggtttcaccatgttagccaggatggtctcgatctcctgacctcgtgatcagcccaccacgggctcccaaagtgctgggattacaggcgtgagccactgcacctggcctaaacccagattctctttctccagaacctgaattcctcttaacatcatttcttttctttttttttttttgagttggagtctttttttttttttttttttttgaaacggagtctcactctgtcgcccggctggagttcagtggcacaatctcagttcactgcaacctccatctcctgggttcaagcgattctcctgccttggcctcctgagtagctgggattacaggcgtgcgccaccacgcctggctaatttttgtatttttagtagagatggggtttcaccatgttggtcaggctggtctcgaactcctgacctcatgatccgcccgcctcagcctcccaaagtgctgggattacaggtgtgagccactgcgcccagccatgagatggagtcttgctctgttgtccaggctggagttcagtggtgcaatcgcagctcactggaacccccatctcctggattcaagcaattctcctgcctcagcctcccgagtagttggaataacaggtgtgcaccaccatgcctggctttttttttttttttttttttttttttgtatttttagtagagacaggggttttatcatgttggccaggctggtctcagactcctgatttcaggtgatctgcccacctcggcctcccaaagtgctgggattataggtgtgagccactacacacagcttaacataatatctaataggggaaatcctaccttattgtatttattttccaaaagaaaaaaaactctattcttgtctgtttattttataatttttttttttagagtcaggttcttgctctgtcacccaggctggagtgcagtggcgctatcatagctcactgcagcctcaaactcctgggctcgagcaatcctcctcattcagcctcctgagaagctaggactataggcgtgcacccatcaagcccggcaaatttttaacaattttttgtagaaatggagtcttgctatgttgcctaggctggtcttgaactcctggcctcaagggatcctcctgtcttggcttcccaaagtgctgagattacagatgtgagccaccatgcccagccaatttattctctcaaattaacttcaaaaatcaatttgacctacacacaccccacaatatgtaccaatatgtaccatcatgatatatcaattttgaaaaatatagagaaaaagaaaaatgacagtagaaaaaaaaatcactttgatccatttcatgcgagtgagaattgtcatcttccccccactgagtattcccatccagaaacacgctatgtgctgtctctcggggaagtggtatggatttcctcttataggtttcacacacatttcttgccacagattttctgagctcatagttttttagtttagtgtttctcagaccgtaatgtgcatacaatcacctagggatcactttaaatgcagtctctgattcagtaggaccagggtggagcctaggattccagttttaacaagctgtcagtgacagatccaatgctgatctgtgggccacgctgtgaaccacaaggttctagttgtgccattgtgtgtggaatagtttagtctcagatctcagaactggctagtgggattatctagacaagctaataacttttatttagccagttttacatacagttccctttctgaacccaggaggtttgtttgttgctgtggagactagctatggttaacaagggttggaagagagtttggggacaggaaaccatcatggtggtactaaaagaggaccagtggggggctgggcgcggtggctcatgcctgtaatcccagcactttgggaggccaaggcaggtgtatcacgaggtcaggagttcgagaccagcctggccaacacggcgaaaccccgtctctactaaaaatacaaaaattatccaggcgtagtggcgggcacctggaatcccagatactcgggagactgaggcaggagaatcacttgaacccaggaggaggaggttgcagtgagctgagattgcaccagcactgcactccagcctgggcgacagagcaagactccgtctcaagaaaaaaaaaaaaaaaaaggacctgtgatgtccttgcctttaattaaattaaataatttaatttaatttaaaccaggcccagttgcctggcagcagcccttaccccttgcaatgtcatcctattccatgaccaagactcagaccccatgaatcccagagcttgacagagtaggtgctcaataaatacttgctggatgaaggaatctagggcaacccccctacccccaactcttgttgcagataaggaaactgaagccccaagagtggaagtaactcggagctgttactagcatggctggaataagaacccaggttctctgccttctgttcagagttccactttgtgctggccctgagaaagacatcagggaagcacagtgcattagagctgagagaccttcaagatcatctagcccagggcttcttattgaagggtgttttagagccaccgtatacatgcctgggtctcacccctgaagagtctgattcaataggtctgtggtgggcactgtaggctttaaacagtgcccaggtaggtagttcagattcacagccaagcttcggaaccagtgtcctgacccaatcctcttgttttgctgaaggagaaactaaactggcaaggaaagcaagttgctgttggctacagagaaccattccacagaacacccttaagacctgtgctttcagaagtcaggaatcatgtccagtcatggaattcttgcccaggagaggaggaagaagcaggggagcaggaactgacactgacttagcacctcgatctggtatcccatttctccaataacagtgacaagccagaaaatttgtcttgtgtgtaggtaggaaaggtagttgattaagggtggtgatttgagagatgcgggaggtttttatccccatcttttttttttttttttgagatggagtctttgctctgtcacccaggctggagtgcagtggcgcgatctcagctcactgcaagctccgcctcccaggttcacaccattctcctgcctcagcctcccaagtagctgggactacaggcgcccgccaccacgcccggctaattttttgtatttttagtagagacggggtttcaccgtgttagccaggatggtctcgatctcctgaccttgtaatccacccgccttggcctcccaaagtgctgggattacaggcatgaaccactgcgcccggccttttttaaaaaaaatttctagaggcagggtctcgctatattgcccagactggactctagctcctgggcttaagccatccttccccactcagcctcccaggcagtttagactacaggtacacccatcatttaaatgttgcatagaggctgagtgcagtggctcacacctataatcccagcactttgggaggccaaggcaggcagattgcctgaggtcaggagttcgagaccaacctagccaacatggtgaaaccccgtctctactaaaaacacacacaaaaaattacccaggcatggtggtgggcacctgtaatcccagctactcaggaggctgaagcaggagaattacttgaacctgggaggcggaggttgcagtgagctgaggtcacgccactgcactccatcctgggtaacagagtgagactccgtctcaaaaaaaccaaaaacaaaaaattagccgggcgtggtggcaggtgcctgtaatcccagctactcaggaggctgaagcaggataattacttgaacccaggaggtggaggttgcagtgagtcgagattgcaccattgcactccagcctgggcaacgagagtgaaactctgtctcagaaataaagaaaataaaaactaaacgttgcacagatcatacagcagagtaattaaaaatgcagagatctggccgagtttggtggctcacgcctgtaatcccagcactttaggaggccaagatggtgccattgcactccagcctgggcaacgagagtgaaactccgtctcaaaaaaaacaaaaatgcagagatctcttaaaacaaagaaccagtgagagagtttatatcccagctctgccaccgaccaccaatattaacaaattatttaacctaaaactcaatttctctacttgcaaagtatgccatttaacagagccaacctgttatagcctagaggtgaaatatacaatggtttgagccagactggctggttcagatcccagttctgctacttattggctgcatgactttgggcaagttacttaacctctttttgcctcaatttcatcacttttttttttttttttttgagatggatactcactctgtcgctaggctggattgcagtggtgcaatctcggctcactgcaagctccgcctcccaggttcacaccattctcctgcctcagcctcccgagtagctgggactacaggcttgcgccaccatgcccagctaatttttatatttttagtagagatggggtttcgtcatgttggccaggctggtcttgaactcctgacctcaggcgatctgcccaccttggcctcccaaagtgctgggactacaggtgtgagccgccgtgcctggcccatcactaattaaatggtgacactacagtaataacaatttcctcagaagattattgtgaggattaaatgaattcatatagttccctaacctctgaaccttggggtgcccagggccacaatccttaatcccttctctgcctacactcacttccttggctttaaataccatttagggtcaggcacagtggctcacacctgtaatcccagcactttggaaggccgaggcaggtggatcatgaggtcaggagttcaaaaccaacctggccaagatgatgaaaccccatctctactaaaaatacaaaaattagctgggtgtggtggcggatgcctgtaatctcagctactcggaggctgaggcagagaattgcttgaatacgggaggtggaggttgcagtgagcagagattgcaccactgcactccagcctgggtgacagagcaagactccatctcaaaaataaaataaaataaaataaaataaaattaaacttgctttaaaaaataccatttatatatcagccatttccaaatttatatcttgagttcattcctctgctctgaactctttattggaatatatcagcctgcctgatggacacgtccacatggatacaaagtagatatctttagactaacattcccaaaactgaacttttgtttctttttttttgatacaaggtctctgtcacccaggctggagtgcagtgtcgcaatcatggctctctgcagcctctacttccagactcaagtgatcctcccacctcagcctcccaagtagctcggactacaggtgcataacaccacaccagactaattttttacattttgtagagacgggggtcttcctatgttccccaggctggtcttgaactcctgggcttaagcaatcctcctgcctcagcctcccaaagtgctggcattacaggtgtcagccaccatgcccagcccaaaactgaactcttgatctctgtccctatccctggtggtctagtgatcaggaaaaaaattaattaaaataaaaagatctccacccctaaacctgctctttccaaggtcttccttatctcattaactatctcagttaatggcaactccctcctttagttgctcaggccaaagtcctcggagtcatccatccatccatccaaaggccttggctttaccttcaaaagatacttaaaagatacttggaataccctttctcagcactgcaccgtaactgcactggtccaagtcacaatcgcctcttagttggattaatgaaacaggttcttggtttccctgcttccaagtatactctcctatggtctctactcaacatagcatccagagtgagcctatttatacagaagttgcattatgttactcctgccccgaacccttcaatacttcccaatttagagtaaaagccaaagtctctgccagagcctataaggtcttccatactctggcctcaacttctctgctgtcatctttacacaaccctttgcttacttgcctccttgcaagttcccgcccctgagaatcttcatacttgctcattgttctgcctggaacacttttacaccaagatatcctcatggctcatgttcttaacaccttcaggtcttcacttaaaagtccccctgggccaggtgcagtggttcatgcttgtaatcccagcactttgggaggacgaggtggaaggatcacttgaacccaagggttcgagaccagcctgggcaacatgatgaaaccctgtctctacaaaaaatacaaaaattaactgggcatgctggtgcatggctgtagtctcagctactcaggagtatgaggtgggaggatcacttgagcccggtaagttgaggctgcagcaagctgagactgtgctgctgcactccagcctgggcaatggagtgagaccctgatcaaaaaaaacccaaaaagtccccttggaaatgttaggtctttcctgacagttccagccctctctatcctctgtttctgggtcacctttttaaaaaaacacatgtgccccatctatatactatttaaccaacgtattctttctttctttatttttttggagacagggtatcactctgttgcccaggctggagtgtagtggcgtgattttggctcactgcaacctccaccttttgggctcaagtcgtcctcccacctcagcctcctgagtagctgggactacaggtgcacgccaccaagcctggctaatttttataattttttttagtggcagggtcttgccgtgttgtccaggctggtctcgaatcctgaacccaagtgatctgcccacctcagccacccaaagtgctgtgattataggcatgagccatggcgcccagccaatctaactaatgtattatttaatttacttatttattttgtttattgtctgtctttccccactagaaagtaagctccatgaagacttgaagataggaatcctttctgtttttttcactgctatgtcctcagagcctagaccacaacctggcacatagtaggttcttcataataattgttcattaaatataataaatacatgttaactctaattattatcttgacattttggaaacagtaagaggcagaaattttaaacattgacatttcgtgctgaaaacctccaaacaatatttttaagaacatgctaaatgaaaatgtagctctgcctactctgcctatgaagtagccattcttttattcctttactttcttttttttttcaagacagagtcttgctctgtcacccaggctggattgcagtgctgcaatcttggctcactgcaacctccacctcctgagttcaagagattctcctgcctcagcctccagagtagctgagattacaggtgcctgccaccacgcctggctaatttttgtatttttggtagagacagggtttcaccatgttggccaggctagtctcaaactcctgacctcaaatgacccaccagcctcagcctcccaaagtgctggaattacaggtgtgagccaccgcactcagcctattcctttactttcttaataaacttctttcactttactctatggacttgctctaaattatttcttgtgcgaggtccaagaaccctctcttgaggtctggattgggacccctttccagtaacgtcttcctggctaaccatgaggggattatactggggagaccccaacccaaaggaaatagacttcagcactaattggctgactttggagtcaagaaaacttttattttgagctattgacagcttctaacaattgagtaaacacctgtgaacaaaatttggagcatatttgtttttctttctgattttgtcagaatttggacactatttgtgagtattcttaacttatggcaatatggttatttgcataagtgcaataagaacattttcttttgcaacaggacacaattggagaaactggttattttaccaaggctttgaatggaatgatgcgctttcctttaaggaatcaaacttgacttatagaggcaataaagccccttgggaaaactggccatgtgccttgtctgcacagtccttatacagggtttctgacctgtggtaaataaagaatgtcactttctgacaggcccaggagccccaagttatctcgggacctcaagaggaaaggaatttatgcaactcctataggtgtttgacagtacaaacccatggctaggcttggcttttaaaaaggtattatctgagattctttttatggaagaaagttccatcaaagtcaattataaaaatcctatgtgaaaaataattattcttgctgcactttatacaaatgatcagactgaatataataaagcaaattggtcttaccgtgatttttctttagtaaaaacgggagactggagaaaaaaaaatatgtttcagtaactgtggtacacctgttactagattctagtcttatcagttgtttttgagcttgttttctgcaatttagactcacctgcttattgctgtgaaccaatcagtgatctctgactgcagctcagatgaaacaagagggatgagtaatgtaaaaatccggatcaatattctaattctaggcacatattggaatcagctagcaacccacatccacttggtttccaacaattgcccagttcatggaaagcccaggctgcagggcaatggcacgatctcggcttaccgcaacctccgtctcccaggtttaagtgattctcctccctcaacctcccaagtagctgggatagcaggcatgcgccaccaggcccagctaattttgtatttttagtagagacggggtttctccatgttggtagggctggtctcaaactcccgacctcaggtgatccgcccgccttggcctcccaaagtgctggggttacaggtgtgagccaccacgcccagctggaaagccttcttatttagtttacttgggataattttgtaggaggatcacttgagctcaggagttcaaggctgcactgagctatgatcatgccactgcactccagcctgggtgacagagtgagaccctgtctcaaaaaaaaaaaaaactatatatctacatatatatatataataaagaaaaaagatgatggacaaagttatattagttcccatcacaacattatgactgattttccccactattttccaattatatgtaatgttgattctaaaataaaataaaatgttaacttactgaaatatgaataatatatccttcatataaaaagaaagcaggctgggcacagtggctcacgcctataatcctagcactttgggaggccaaggtgggtggatcacttgaggtcaggagttcaagactagcctggcaaacatggtgaaaccccatctctacttaaaaatacataaaattagctgggcgtggtggcgtaagcctgtaatcccaactacttgggaggctgaggcaggagaattgcttgaacctggtaggcggaggttgcagtgagctgagatcgtaccactgcactccagcctgggtgacagagagagattccatctcaaaaaaagaaagaaaaagaaagcaaaactggccaggtgtggtggctcatgcctgtaatcccagcagtttgggagaccaaggcaggcagatcatgaggtcaagagattgagaccatcctggccaacatggtgaaaccctgtctttactaaaaaaaaaaaaaaaaaaaaaaaaaattagctgggcatggtgacacgcatttgtagacctacctactctggaggctgaggaggagaatcccttaaacctgggaggcagaggtcacagtgagccgagatctcgccactggactctagcctggtgacagagcaaaacttgtctcaaaaaaaaaaaaaaaaagaaagaaagcaaaactatacattttcctttttttacaattttttttcatgcttcactctgtcacaatcagggctcactgcagtcttgaacacctgggctcaagcaattgtcccacctcagcctcacaagtagctggctgggactacaggtgtgcgtcactatgcccagctaatttgtttgtttggtttctttttttagtagagaccggtcttcctatgttgcccaagctggtctcaaattcctgggctcaagtaatcctcctgccttgtcttgctaaagtgctgggattatagaagtgagccaccacacctggccaactttatcttttgtatagtgcatagaacagtccccaccaaagggcttctactgcaaagtcatttacaaaaacaatgggtaaatattattttttaatttaggccaggcgaggtggttcacacctgtattcccagcactttaggaggccgaggcgggccgatcacctgagatcgggagtttgagaccagcctgaccaacatggagaaaccccatctctactaaaaatacaaaattagttgggtgtagtggcacatgcctgtaatcccagctactggggaggctgaggcaggagaatcgcttgaactggggaggcggaggctgcagtgagccgagatcgtgccattgcactccagcctgggcaacaagagcgaaactctatctcaaaaaaaaaaataataataacaattattaaatttaaaaatattttaacttaaaaatattatgtaattagatttttttttaatgctggaagaagctttcattaacagttacaagccaggcacagtggctcatgcctgtaatcccagcactttgggaggccgagtcgggtggatcacttgatgtcaggagtttgagaccagcctgaccaacatggtgaaaccctgtatctactaaaaatacaaaaaaattagccaggcatggtggcgggcacctgtaatcccagctacctgcgaggccgacgcaaaagaattgcttgaaccgggatggcgccactgcactccagcttgggcaacagagtgagactctgtctcaaaaaaaaaaaaaattggttacagattacaccttgttttctttaaagcctttaaagaaagtgtaatctgtaactattaataaaagcttcccaaacaacgaaactgtttactttcccgcgcaggctcaggttgcctccagctaaacacaaatgtgggggctggagaaaggcctggagagctcccagcgccctctgagacatggctccaggtcacacagcccaaagccttggcctgttttgtacgtggacggggcaaagagaacaccctcgccgcttctctctgcctttagcagggctgtaggaaacccccaccagagacctccagcttggagaggaaagagtggaacagccctctggaagcaagttacccacaggtttagtttgcctggagagaaacaggccggagagagactgcggcctccctagggtcttctgacggcaaattcctccagctcagtggctgctgggcagcagcacagccggtttctctcaagggcacaccccacacaccgcgtcactgtgcactagcctcagatgacagacaagcctttcacaagacttttgtggcactgttcatttctgagaccttctctatgatgagctcaaactgcttacctcagagaagaaactgcgtgcacagaaagctgctgaggccagcttggggccccttctttcctgtccctgggcacttccctggctgctctctttccccactgcccagcccaaggagtcccctctgcagctgacccgggttcagcctccagaacagcgagttccacagccctgaagcctggccatcgtcccttttctggacactggactggttcatagggctcagtgccctgcggctttctcctccccaccacaggcctgggaggggcaagaagcaccagtttgttttctgggtcagcctgcagcaaagagcgactgccctcaccgacaagctgagcctctctcccagcagcacccccacagtagccagcaggggaccctggaggatcgtggagctggatcaccacccagaagacatgaattcctcttgtccagaggcagaacaacagcaacagcagccacttatgctcctgtagtttccagagcaccttgcttaatcggaagtaggatgttacactccagagactactgatttacatatcacacatgtgctcatccatccattcaccaaacctctgttgactgctcgcgctgccctgcgttcctggcactgtgcagggttataatctagtaggaaagacctgacaaggtcacagatgtcagtactgaaaggaagagtagggtagatggccaccccacccccaccccaacctcaaaaaagagactaaaaaattactgtcacttgtgtaattcatcaacaaactttactgagcacctaataggcactgagtgttttcgtgtattgatcacgcattgatcctcacaataacctttgagatgggttgtgccatttacacagggcgaagaagagagactggccactgtcacacagctactgatatccaagctgagatccaaagctcctctgcttctcctgatgagaatgagcaccacaggcaggccacagaaaaacacccaggagagccaaactcagacccaccccagatttcccaccccaccctccactggctccaacctcactccctcttcattcattcagccagtctgtcaaacacagttattgtactcctgtggggtgcaaagctcttgaggaaaggggaggaaggaagaatcataaatggctttgtcacccaaaggctgtgatatgggcttagtgcggaaattagagtatcacttatcagcgttggggctgccagggttcaaaaaatacaggttaagggtgcccgatctcacctttgcgttgtgggtggccggggcgcaacggtttaaccttgaatttagcaggagtctctttgtacgagaaaaggggcacctgagaatgggcccttgaggagtaatttaggcttttcggtcaatccagaggaatattatgggaaagggccgcgcccgaattcccaggaactggagaaatctttaagcagagggggtggagggcaccaaaaagagggaacgctactggggttcaactggctggaggacagtgcacccccaatgggggaaccaagaaataaatttgggaaaaaacagtagacaatctataaaattttttttttttttttttgagacggagtctcgctctgtcacccaggctggagtgcagtggcgcgatctcggctcactgcaatctctgcctcctgggttcaagcaattctcctgcctcagcctcctgagtagctgggactacaggcatgcaccaccatgcctggctaattattgtatttttagtagagacgggggtttcaccatgttggccaggctggtctcgatctcttgacctcgtgatccgcccacctcggcctcccaaagtgctgggattacaagcatgagccaccgcgcccggctgacattctataaatatttatatctgggaaacaaaagcggggaattggggccaggttacagaggacataaactgtggcaccagggttggcacttgcttctctgttcacaagagccgttggcgggatttcccattgtcccccttgggtaggtaaggccaggtggctgctccatctctgccacctccagcgccggtcccactgtgtcagcagccctgtcccctactgctgtgtcatcaattactctcaggtgcctggcccccacccagtggcccccaccttgcagccccgaaggcttccttcctggggcagcagggccgagtcatttggaaacctctctcggaggagctccgtgatcaaggtgcagatgcggcaggtgggccggcctcaatcatgtctccaattgcgacggtgaatgcggtgaggagtttcgttggcccatcacctctgccttgggcctggctcactttcactgctgagttagttccacggccgcctttgatgatgccgcttcagcatcttttttcttcggcgtttcctgctcctttgttttcaaggtcactctgtcctgcctgccccactctgggccacccaaggccaagcctctaagctccgcgttgctgaccacagttcttcacactagcctcactgcgaggctccgtccagactgaacatggggaagatgaacctttcaccatttgatgtcttgagcttctcctctagaacaagcaggctagctgccctgctcagggccggctcatctctttctccctggaggacagagctctgggccctgagtcagaactagctggggttcctcactaactgggtagacttatatgatgcatgagacctatagactcttacttagttttctcagaaataacataggccaagaacgcctgcttgcctgtctccacaggctgggatgaggcccttatgagaccaagaatgggagagggcttcataaactgtaaattaatctgggagcattacagtcatggttattagtttacagagattgagttcacgttgttatttgctctcttagcaccctgttctttttcttcatagcactttcacattttctaatgatattataagttattattattactaagcacgtagtttatgggtctaatgcctccctcctcaccagggtataagctaccgcagagtggaagccatgcttcattttgtttctcatcactctgccagcacctggttcagagcctgtaatgttgtgggggtttaaggaatactaacgataaactggtgagttatttgaggacccacgaccatcctcgcaagagacttttgttaggccagtctgtcttgtccactgctgaagcctggcatttggtaagccattcatacctgttttttggaagttgagatgaatacaccttagccgggtgtggtgtctcacacctgttatcccagcactttgggaggccgaggacgatggatcacctgaggtcaggagttcgagactagcctggccaacatggtgaaaccccatctccactaaaaaaaaatacaaaaattagccaggcatgttagcccacctgtagtcccagctactcgggagactgaggcaggggaatcgcttgaacccaggaggcagaggttacagtgagccaagatcttgccactgcactctaacctgggtgaggagagcgagactccatcaaaaaaaaaaaagagaaagaaagaaaggaagagaaagaaagaaagagaaagaaagaaaagaaagaaagagaaaggaaaagaaagaaagaaaaggaaagaaagaagaaagaaagaaagaaaaaagaaaagaaaagaaaggaatgaaaacaccttaaacaccaccagcttcatcgtgaagttctgttgctgaagtccctgccatgtgtctcagttgccccctctgccatccaaatgcccagacaggctctctgggcctctcagtatccaccctcattgccttctcccacatcttcctctgctccagtccagacaaactgctcaccatcccttccccaagatgtgcatttaccgcctgcggacctccttccctcaaagtcctgcctgaagttccttcctttttgacctccctttaaaaagcatgagtgggcctgacgcagaggtgcatgcctgacatccccgtgctttaggaggctgaggaaggaagtttaaggccaggagttcgagaccagcctgggcaacatagcaagaccttatctctacaaaaaaaaattaaaaattagcctggcatggtacacacttatagtcccagctgctcaggaggctgaggtggaaggatcacttgagttcaggagtttgagactacagtgagcgacaattatgccactgcactccagcctgtgtgacagagcaagaccttgtctctaaaaaaaaaaaaaaagcatgagtgtgtgtgtgtgtgtgtgtgtgtgtgtgtgtgtatgagagagagagatagcactttggacctatggaggatttctatttggaaagaaaaaggcttttacatacaagatattatttaatagcaaaattggccatgcaggtattttacaattgtacatattaggaaactaatgctcagagaagttatatttgtaattttcaaactggggattgtgacttatgtgtggacccatgaaagcagtgtgattcattgaccgctattaaaaatagaaagagggtcgggcatggtggctcacgtctataatctcaacactttgtgaggccaaggtgggaggatggcttaagcccaggagttccagaccagcctaagcaacataacaagaccccatctctacagtaaatttaaaagttagtttggtgtggtgatgcacacctgtagtcccagctactcaggaggctaaggtgggaggatcacttaagcctgggaggtggaggctgcagtgagccatgattgtgccactgcactgcagcctgggtgacatagagagaccccatctctacaaaaaagggaagaaagaaagagtgagagaaagaaagagggaacgaaaggaaggaggaaaggagggaaggaggaagagtagaaaatatgagtatgctacccatactaagcagtgtttacaaaacttactgtgtatttgtgtgtatatgttcatcacacatgtccaactagcttgtgatataaaatatatttcttcctatgggtcatgatcaaagtgacaggattacatgacatgctgaaagctaactagtagagctcatgcattacttattagagtagagctgagaccgaccagagagatagaggtgcaacctgtcagagcccgggaggcaccacagaaatctcaacggtgccagggtggggcccagggaggccggtgttctgggaaaaccaactgttgtgtgctggttgtatgaagtgctgtgttgttgtgggttgtgtgctggttgtatgaggtgctgtgttcttcctgttgtgtgttgtgtgctggttgtatgaagtgctgtgttgttgtgggttgtgtgccggttgtatgaggtgctgtgttcttcctgttgtgtgttgtgtgctggttgtatgaggtgctgtgttgttgttgtaggttgtgtgccggttgtatgaggtgctgtgtcgttgctgtgggttgtgtgctggttgtatgaggtgctgtgttcttcctgttgtgggttgtgtgctggttgtatgaggtgctgtgtcgttgttttgggttgtgtgctggttgtatgaggtgctgtgttgttgctgtgggttgtgtgctggttgtatgaggtgctgtgtcattgttgttgattgtgtgttggttgtatgaggtgctgtgttgctctggagagacgtcaactatggcaccctttgtgtggagggactgaaggccctgctgggtggttgggagctccaggttggaaaacaagctgtgtggggacgagtttaccaattggtatatggctgtgtaccagtcctacgtggcctagagcggtggttctaggagtgtagttctcaggccagcagcatagcgtcacctggacactcttagaaatgcacattatcaggtcccaccccagacctcccgaatcagacactctcgtggtggggcctggcaacctggaggtaacaagccctcctggtgactctgaggcataaagtgtgaggagcactcccctggggatgcctgtttggcattctgtgtttggcgtgtctttgcgcaagcaggcagggtctggtctcagagcggccttgctgggaagcagacatgctgggcctccagtgcagcgtttcttctgtcacccactcagccttacagcctacccagcgcatgcgcccacagcacttaggtgcgaaggaatgctgcacgtttcccccattccctgtgccttccacactgctgactccacccacactaccttagcaacacggtagagttttgcatattctttgaaaatgtgcccagttgcatgtgaatatgagcatgccaacttgcatgatgtgtctgttttgccttctctgttagacaaggtgctcctccatcagaatctcgcctctggctgccgcagtactcagtatacaaacacctgatccaagcaccagactcactctaaccctggccacacaacctgccccaggccgacgttcccaagctcatttgtggcccccatgaccttgtggtaaccttgatgtgcctacccagcacctgcagcccatttcctccctgcaggactctacctgtttcctaacgagaggggagctgtgcgtgggtgcaggctgccggcaatgacagcctttaccaccccacttcctgtgttgacttgtaatggggtgttgggtccctgctgtctgagtgagctgtgaacattcatgctacttcccattactgtctgaagcttggtttccacatctgcagtgtggtaataaaaatacccaacactttgccggacgcggtggctcatgcctgtgatcccagcactttgggagaccaaggcaggtggatcacctgaggtcaggagatcgagaccatcctggccaacatggtgaaaccccgtctctactaaaaatacaaaaaattagctgggcgtggcggcacgtgcctataatcccagctactcgggaggctgaggcaggagaattgcttgaaccagggagtcggaggttgcagtgagccgagatggtgccaccacattccagcctggcgacagagcgagactccgtctcaaaaacaaaacaaaacaaaaaacccaacactcaaagactgttcagggaatgaaaagaaatgatgtgtgaaaaacctatcatagttcatggcacatagaaagtacctgatgaggagcctgtgcaggatttagccatagttttccccttagccagccaggtaagtgcctgtcctttgcaaaatggcgcctctgagagacgggccgtgtggtcttgtggagggagccctggatttggtgcctacagggctgacttcaggctctgactctgcaacgaaccctccctgcaatcacgagcaagaaaatgagactctgtttccttgtcctcacaaaatacggccaggagtgatgccaatccctccggcacaagccgcttcaaggactacatataattaaatgtgaagattaagtgaaatataaagattaagtaacattaaatttaaactttcatgggactgtgtagaccggtgactgctatgcaagtctatggcgagtttccttcagtgctgagaggtataccctactcttcctgaggctgatgaggtagggacctgggagctctgttctcagctgttgggaaagacccagagaaagaagagaacaaagtctctggccatgtcagagagggagagagtcctaggttaatagaaggggaaaccccagcccgttccctgtagcagcaccccaaaactgtgtggaacagcttactttttctgtggaatatagaaaatgaactccaagacaagtgattgtatctaatctctggaacaaatagaaatttaatgtaatccatggactgtaaagtataattactgagaaaaatacacctgagctgatgtaagcggccacccttgcctaaaccagacacaaacccagtcttggcggaagtatcagtagtctttctgtctttttttttttttttttttttctgagataggatcttgctttgtcatccagcctggagtgcagtggtgcaatctcagctcactacaacctcgacctcctgggcccaagcaatcctctcacctcaacctcctgagtagctggaagcactagtgtgcaccaccagctaatatttttattttttgtagagatggggtatcctatgttgcccaggctggtctcgaactcctgggctcaagtgatcctccccccttgacctcccaaaatgctgggattacagaggcgagctaccatgttcagcctccagtggtcattttgacgagaaggctagaaaacaatttagcctcaattagactgcctatggggtggggattgggatcctgcataggtgaaatataaacaagttgcacactgaaataaaacctgagctgcctgacctggaagggtcctctgccatccgattgtcacacacagatggaacctctgacatctcctcttcaaaggcaaaggatcgcagcttaagcgttgccctctctatcctagggagctagtctgactttatgtgtgtgaagattgtaagatcatggtttctagtagaggcagtaactctctgagccttctcaaaacaatattagaactcacggttgctgggcatggtggctcatgcctgtaatcccagcactttgggagtctgaggcaggcggatcggttgagcctaggagttcaaggccagcctgggcaacatggtgaaactctgtcttgacaaaaaacataaaattagccaggtgaggtggcatgtgcctgtagtcccagcaactcgggaggctgaggcaggaagatggcttgagctcaggaggtcaaggctgcagtgagccatgatcgtaccactgccctccagcctgggtgatgaaatgagatcctgtctcaaaaaaaaaaaaaaagaaaaagaaaaagcctcaaggtcagaaggtatttaccactgggggcaaactgagttgactatcaaaggtcagaggctaacacaagtagaccctgggaagctgtagtgtgttcaccatctggagagaagaatgggatctctgaataggcccaaaaagtcaaagacttcaggtgacagtcacagatgtgtctaatgtgtgacgcctgagtcagccatagagaagctggtaggctacctctctgctgcccaaaccatcatagctgaaactactggccagagcctgctgctatagcacctgggaagcagtcttaagcctcccccaaaactctttttctaggcctacagcacatgtggaaaatatagagaactgtggaaagagtaggagaggagaaggccataagagcagctcctaccttgtccagtacatgctccaaccacttccttgctcctccccctgccctatctcatcatcattattgccatagccacaccaccatacacagaaggcccatgatgtgccaggcacaaggtaattctttttttttttttttttttgagacggagtcttactctgtcaccaggctggagtgcagtggtgccatctcggctcactacaacctccgcctcccaggttcaagtgattcttctgcctcagcctcctgagtagctgggactacaggtgcccaccaccacacccagctaatttttgtatttttagtagagacggcgtttcaccatgttggccaggatggtctcaatcccttgacctcgtgatctgcccacctcagcctcccaaagtgccgggattacaggtgtgagccactgcacccggccatgcccgggtagttctgtcgcccgcactggagtgtggtggcgcaatctctgctcactgcaagctccgcctcccgggttcacgccattctcctgcctcaacctcccaagtagctgggactacaggcacccaccaccacgcctggctaattttttgtatatttagtagagacggggtttcaccatgttagccaggatggtcttgaactcctgacctcgtgatccacccacctcagcctcccaaagtgctgggattacaggcgtgagccactgcgcccggccagataattctttctacacattttttccaagcagttctcatcatgtcccacactgtccaccctgtccccctctccaggcacaccaagccttcactctctccaagcctccagtggccaagacttccatgaagtctttcctgacctttgggtatagtaagtctctaatggcatgaagcagggttctggttttggcttcatcctgtcaatatttgccatcaggacttggatagacccaaggatgactaatctatgttgttatcacatcaccagatgacagaattgggatcagaaaaatttccctttataggttgcaacaatggcccagaaccttcaaaatgaaatcctttaggcatgttattaagaggagtaggaccctgcaggaaagtccaattgtattgtagttacatagttatagaagtatggaatcttttttttttttttttttgagtgtcaccaaggctagagggcagtggtgtgatcatggctcattgcagcctcaacctcctgggctcaagcgatccgcctatctcagcctcctgagtagctgggactacaggtgtgtgccaccatgcccagctaatttttgaattttttgtagagacgaggtttcaccatgttgcccaggctagtctcaaattcctgggctcaaaggattctcccatcttgacctcccaaagtgctgggattacaggcatgagcaaccacgccctgccaagtatagagtcttgaacaaggaaatgcatatcgtcctatattttttcctagtcagataatatctagaccattaaccagaaatcacccagaggtcaaaaaacagggcgtcaaaggacccagaaaccaagtctgcaaataacgactgaagacactgtggaagtgtgtttgggagacaacaagactctcaggatgtgctggctgtcttcagaggatgcttattggaagaggagtcagacagtccagacagaaggcacagccaggacctctggagaggagttacaggaagacatattttgactcatcataaggaataagtttctaatcatgaaaccatcctccactgaaacatgatctattgaaaggagcaaatgtctcaccttcattgatgttcgtattcattgattctgggtgatcatctgataaggatgcagtgacgagaatcttgcatttgctgggggtgggggtgtggttgaggatagtctggtttatattccaaagttcctttcaattcctctatgattctatacgctgtactccttcctgatcaatgtccctagccagggtggccaaggctaagtcaagtatgctaagggattggaggggcagggatattgagaatagggtgaatggaaggatgaggagttcccagcaagcttgggacacaggaaaccttggggcagcttcctcctggaggtttcaggactgtacgtgctggagaagaagtgtgatgccttgtcctgaaagccgtcttctttgaaagcagcttctaaaggcagtgaatggagaagagcgaggaaacgaccccaataccaccaacagaggctggaaactcctcaggctgtttaatcctaagaatgatgcatctgttggccgggcacggtggttcacatctgtaatcctagcactttgggaggctgaggcaggcggatcaccttaggtcaggaattcaagaccagactgaccaacatggagaaaccccatttctactaaaaatacaaaattagccgggcgtggtagcgcatgcctgtaatcccagctactcgggaggctgaagcaggagaattgcttgaatccgggaggtggagtttgtggtgagctgagatctcgccattgcactccagcctgggcaacgagagcaaaattctgtctcaaaataaataaataaaaatacaaaattagccgggcgtggtggtgcatgcctgtaatcccagatgctcgggaggctgaggcaggagaatcgcttgaacctgggaggtggaggttgtggtgagccaagatcatgccattgcactccagcctgggcaagaagtgcaaaactctgtctcaaaaaaaaaaaaaaaaaaaaaaaaaaagaatgatgcatctgttggggatgcagtggggtaagcatcttcagtaagcaaggtgtgaagaggggaaagagggaaggtgaatatggaggagagggtgaaggagggcactggaaagggtagtaggatcccagcaaagggcgatttggctgaaagggagcgtgataacaagggtgggggtggggccaagaagcagccaccatgtgtgggtgcctctgtgcgtgcagtcatctttctcacatcattgtggatcaagagaggaaatgcccacttctggaagaaaaagccacaaaatgagacttggaagggaaattgatcaacatctacaaaacggcttcttaaaggaagcggccctcagacaggacagagttgagggaaaggacagaggttatgagtgcctgcaagagtggcagcctggagtagagaaaacactaaaggtggagtcaaaagacctgagttcaagtcccagctctgccactggttagctgtgggatctcgggtaagttgctctccctctcggcctcacggacctcctgaataaaaattgagggttagactggatgatctctgaagccatctctagcttggtagtttatgaggttaataatttatgagcaaacaaagttaatttatagatagaacatcattatttttgagtcagaaaatgactctgtaactatgtgcttttcttggtgatttcactttttttttttcttttagagacatggtcttgctatgttgcccaggctggtatccaactcctggcctcaagccatcctcctgcctcggccttccaaagttgatttcatttttgtcttccagtattgttttactgttgttccctttgaaaaattctaacctatcttttctgaacttgagctgagaagggaaggggttttgcctctgttgggcaaaaggatggtggcaagtagtgtgaccaagtgccctaacttgccaggacttaggggtttcccaagtcaagggacttttcagtccttggcagactggaatggttgatcaccctagtggtgaggaaaatgaaggtttggaggtggcttggaggagaggttgctgggagagctcttctcctgttctctgttgatcaggagtttccctcatcaacctgctgactttgcgtggtggtttcattacaagttgtgagccccttattgggggtatagggaggagaagtgagggcagcctttaaactagtcataggccccagttgagacaattattgccgggaaagaagctgaaatgcttgactagcactgatgctgtgggggattttccctctttcttcaaaaaaacagaaaagacccagtggaaaaaaaaaaaaaagtgatgagttgtgaggcaggtcgcggccctactgcctcaggagacgatgcgcagctcatttgcttaaatttgcagctgacggctgccacctctctagaggcacctggcggggagcctctcaacataagacagtgaccagtctggtgactcacagccggcacagccatgaactacccgctaacgctggaaatggacctcgagaacctggaggacctggtgagtagacacgggtagcttcctgtcgccgaggccctgtctggaattctaacatcctttgccagagtccgagggagaggggacagtgtgggaatcctctcccactgtggatctgtaaaatctagacaggtcagtcagctcccgccctttaagagtttattttccattctgtggaagaagcagataaggagagctgctgtccttaggagacatcctttagaggaagctggaagacacgggttcaggccctgcatcctcctctgagttgctatgtgactgggaacaggatacttcacctctccattctttctctccttttctcttagggtcggaatatggaactagacaggaaagtactttggaggttttcttaccgtaaggaggctggcattgctaatcagtcaatgaatgcatagctgttcgtctctggccatatgattatgtcatcagggcactacattctgtgttgggtggagaagttgaggacctggtctttgccctcaaatagcttctgctctggccagagaaaaaaatcactcactggaagctattaggcaacaattatgtgctaaactgagggaatgtgagaccagatggtagcaaggaagaggatcccagcaggctggagtcagggagcagggtgagaaaactgttaatctgacaaatgtcttggaacctgttgtagaatctctagagataaggtattcttggaaaggtttcttgggtgggctaagaaaatggtctccagcactacgctgccaccactcaagtctctccagtgaagcgtagtggtgcagttgacttggttgtcactgggctcccagaagatgtgtgtgtgtgtggagcagctcaaccagagaaacacagggttccttgtgagccgacggcagaggctggttgtaagggtttcttggaaacttcttcactgtcttttctccccctggagagaggacttgtttcggggctgcactctgggttagatcatgaaggagccaaaccctggctcctaccaactctcctgtcccaaacttaccctaagatattgtctgactccctcctgctcccccggctggagtggactttgtggagtggactttgtagttccaccaaccatgttcccagacttgctcagagaagcccgcctctcgcttgcccagatcccaaggctgggaagtgtaagtaggacacggggagaaagtgggcagaagggctgactacccaaagcctggcccctcggatccaaaccgtaggtggaatcagagccggaccattcatctaaccaggacctgctacataatttgtgggacccaatgcaaaatgaaaacatggggccccttgttgaaaaattattataaataagaaggcaacagcagagcactaaacctcgtggggggtcctgctgggtgcaggcccccgtgtgactgccccagttgcaagcccatgaagctgccctgagtctaatcacagagtctgggcaataccccaaatcagactaaaaacccgcggccccaaaggggcaatgtgctcccaccctggcccccggtcacagccgctggcctcgcctgattaggttactgggcgtcttcctctgcctgcagcttcaaactgaccacgagccctgacccagttggacatcttagtaaccaactggagacccggcgggtcccagcttctgagaaaccttaagagtttcccctaactgcacgcctcacctcactgagtgacctactagggacaggtgggggcagggggcaggggcagcagggcatgtcccaagaaaacctacatctgggggaaagggacccagtgactttcttcatgtcacacctcaaatgagtgatcctcagccaggcattccaatatctggatccctcactcagggtctagccaggagcccaggagtcctaggaccatctgggctctggagctcttcagccagccaccagtgcctcgttcccccttcacgaatctcctacacaccctgtctccagggccaatgtcccctcagaacacagaccctctcctccgcccccacccactcactgaagggccgtgagcagcttggcagactgtccctcagtgtcacagtacaaaaacctcgggcgtagtggtacaggcaggagaatcttgcatgtagcagcttctcaataagtatttattgatttgtgatgcagtaaaggtcttagctcaccattttcctctggagttagtctgggtccttctattccttctgcttcctattctcctccttgtccttgcccataccaggtattggttcacattccttgaacgctgggttttacactctcatgttgagctaagaactggggccttttggttacacaaacttgccagaaaaaaaaaaaaaaaaggaactgggggctcctggccataagccaggttcgtcattctgtattccatttgtcctcttgaactcgaagaccaactcgagccgcttaaaatgtccacttctttaaggcaggggctggggggtggggacgggctgctaattctcatcaatgaaaggtccaaatagaacaaaaattagatggctaagaaccaggaacaagaagattccaggtcctggggtgggtatgccagggacccatcctgctggaaaggccgatcctggcagacctagagcagaccctgtctatgcgaccctcgatctgagagcctccttccaacagaaccagggcctgggctggggcatccacagaggctggtcataaactatacctccagccccaccctgcacaccagccgggaggggaagctgctatagcgcacggtgaagctggtccaagccccagagcctggctttctatgacccctctccatagacaattaccacacatcatgacttcagtgtgaccagagcatcacaggcgacacagcccgtccacgtggaccatctcatttcatcatgtaggtgtgaagaagaggaaccaaaaccagctcaggctgtttctgggcttcatctaggggaaagggaggttctccacccgccccccgcaaccaggtcaaaagtcccagaggaaccccagcagaggaggcccaactggggtgtagttggaagggtcagagatgagggagagccccaaggccaagctgaggatgggtcagggtcaaagtgaatatgggttcgggcatacaaactgcagagtctccgtcaggaactcttgctttccccagggacgcaggctgcagctgatcccactcctctagcagaacggcagaaacagtggccgcatatgtggacctaagaatcaggacacaagaatgagcattctttcaagagtggtggggaaaaatatttccaacccaggagatggtttcaagaggctgccacacacacctgggaggcctgtctgcctgcatcttggactgtgtgactctgtatccaaagggcaaagagacgctggggtgccaggtggggctcccttaagcctaaagacttgctgcagaggcttggagtagcttaaactctccccctaacaccacatccagcacagtacctgcttctgatggccaaaacccgtgggtagagatgaaagaggagtctcacagacttgtccctgaaggctgtgggtgcggcaagggagatgtgacaaatggcaagccagagtctcagatggtctttaggggctgtgggcctcctgaagaaagacggggtaaggggtacagacctaca[450 bp omitted]ttgaaggcagagtccagcctccttcttcccagggcaggaatctcttcccacacacttgggctcaaacgttcctctccttcctaaaggtaccatctcattgctggacagttctgtctgttagaaagttctccctcctttgactgaaacgctaccccctcagcttctgcccagtccttctagactgccccctggaagctcatagcaagagtccattgctgccctcttgcccatggagcttctttccaagccttgacatcagccctcagggactcaagtcttctctgtcccagacactacacccctagtacctgaaaatttcctctatgggcagggttttccaagcccctcaacaaagtggtcatccttgtccagaccaaccaaactgggctggtgtcagctgcccacttacaagcctctgttcacctagatgaaggtaacagtggcccttcggctggccacgtcactcccgtgactcatcttaagcttgtaggtgacaaactcccaagtctttctgacgaactgttgttacctggtcctccctaacttatccctggacgggtaatgttttaaacctgagtcctggcttgtatatttttccccatgcaatttcatctggttaggttggacccatggttccagcttgtaaagaactctgtgttgcctgagagtgcccccaaagctgggctgagagtgctgaagaggaggggacccaggatagatccctgaggcatgctaggcacccctgcccaatgcacctgctgacatagaatccccattagcaaatgtgagctgagctccatgctggccagtgctgggcagtggggcagcctcattatttggagaagtcaggtggggcttggagacttaattatccagggaggagcctgcatcctacagtggagggaaggagaagagtaacattttgggccctaccacaggccaagcactttgcatctccttacaccccccacctcccgctaagcccctcaatactggacactgttacagcccctgctcctccccagtgctcacagcaattttctaactagattctagctccactctcagcctcattctggtcattgtgtttcttgccttctttggggcatgtgaccctggcccatgaccaggctgttgtctgctgggtgcctgtctaggccacatgctggtgtggcccatcttggcacctgtgtctatgcaaggtgcatgttgctgtcaagagtgtgtgtgtgcacgagggcctcaggtttcagaagcttttcatgtcaaagaatgggcacaccgctcacgcaaatggtctgccctgtgctccctctgggcatgggattggagggcttccttcagcagcacatgccccatggtattcaggattcctgattcctcaatttcccatgaggccggagccaaccttgctttattgcctctctccatagtttgggggagattgggggagctagaactcctatgtgtgggaagtggctttaacatgtgccactcccgaacccccaaaacgtctgtttgacacctcctgctgagatgtgctgtcaattcccagcacccctcaaaccagcttcctcccatcttaccctctctgaacgctgccagacaaatacctcttggcaaggaggaagacacaggcccctcccaagccccctctaaatctggttctcaggagatgggagccctagggagatgtcccactgcattgactttagatgagcaataactcagtcagtctggaatctttgaagggcaagaacttgtgtggaggacaagcccagaaacccagggctttctgggtcagacaggctggctggacctaagccctcacccaggcacggccaaggtaggtggagtccagccctgctgaccgccccaggccctgcttctctcctccctgtctgaacggcttggctctgcgtgaagactgctgaattccagtattagtcaagtgggtgtgctcagtgacggtattggaaatagctcccaatagagggagagcactcaagataggatctaggatcaaggccatcaaggttattgggagaaggcagaatgcagaagattacggagtgagtccctgcagaggcacttgtctaagtctcaggttataagggctcctggccttctctgggaaactgctttcagagcaggtcagcacacgtctgtcctacgtaaaacacgtggccttgggagggggacacagaaggcctgcttctgagaccttgccatctggttagaaagtgtcatcccaaccctgggtgctgtaataaatgcacacgcatcataaggagaagagagaattccaagaggggagccgggaaggatgtctgaagatgggattgaattcggctttggaggaagggtggaaattaggcaaatttggaaagaaagacctgctagacagaaggaaaaggccaagcagaggtttggagacaggaatgtgttggggtgttggggaaaggccggggggtggtctagagcaataatttattaatagaagacaaagtttgaaaggtcagaggaatatacatttgggaagaacataaaggctgtgttgggaggttagacgtcttcccacaggtccatggttttcaaatgaaagtagaaccattttcttcaatgaaagcttatgtgtgaagcactgcacaagtcaaaagtggagagctctagtttaaagtcaaggaggggagcctggagccccaacaccactccccactccaggggaaccctgtgacacacacacagtcatgggtactctaaagaaagtccttggagctgggcactgttgtcacatacctgcagtcctagctacccagaaggctggggcaggaggaggatcacttgggcccaggaggtcaaggctgtagtgtgctatggtcacacgtattaatagccactgcactccagcctgggcaacatagcaagacactatctatcaaaaaacaaaaacaaaggcgtgtgtttgggggagaaattccatggaatcctactgcatgggatgttctgcaatgagttctaaactttattttttaaaaaaatgttttgtagagatggggtctcgctatgtcatgcaggctggtcttgaactcctggcttcaagcaatcctcccacctaagcctcccaaagtgctgggagccactgtgcccaggagttctgaaatttagcgatgtgtgaatggcactaagtttggcttactccaatcattttctttttttttgagattgggtcttggtctgttacccaggctggagcgtagcagcataatcatagttcactgcagtcccaaattccctggctcaagtgatcctcccgccttgtcttcccaaagtgctgggattacaggcctgagccaccatgcccagactccaatcaatcttctattgatgaacatgatcacaaatatgactttttcttatagctgactttgctattaaatgtgaaattgaggccaggtatggtagctcatgcctgtaatcccaccactttgggaggccgaggcggggggatcacttgaggtcaggagtttgagaccagcctggccaacatggtgaaaccttgtctctactaaaaatacaaaaaaattacctaggtgtggtggcagatgcctggaatcccaactacttgggaggctgaggcaggagaattgcttgaacccaggaggcggaggttgcagtgagccgagatcgtgccactgcactccagcctgggcaacaagagcaaaactccccctcaaaaaaaaaaaaaaaaaaaaagtgaagttgaaaaaataagataaagacaaaaagcagaagaaaaccactgcttacaggtgatggggaaccagtaaaggactttaaacagaacattgatgcgatgggatttgtgttttagaaaacttaccctgtcctctgtgcaggaggtggacaggagtagagaagctggtggggatgggacccatggagagatggtctcctgagcattagagtaaagagaaggaagaccagactgaggcaatggcagagggatgctgcgggaagggttggcagatggctctacccttgcactgatgtatctcccacacctccttctcacagaccctcattcccccagagccagaaggaaagacccaggttggagaatgggtctgctcagcattaggagtgagtgtgtgacccacaactgtggctcctgagaggcaagaaagccctgtggcacccagtgtgaccatcccctccttgtgggggtgccttgctctcctgaaatgggggcaccattaagccacccggagcctggtggacagagtaccccatcccatcctctgcctccctgggttcatcatttatagtattgccattttgaatccacataggttggttataattggttttgaattgcctggggaggggcttgggtagggagggtgggaagaacagagctgggaggtgaggaggaacaggtgcaggggacagctgtgagtgaaaggtgtgaaaacaggcacatgtcttcctttgtggttagctgggtaaacaacctgagtgctggggtgatggggggggggtgatggggagaggaagaggaggatggggaggagggaacttccggagacatcacgggcacaccccctgcacttggagcaggctctctccttctctcctgccagtctccccgtgtcgccctcactttctcctgcctctctctgcctctgggctttctgcttctgagtgctcctagctgcagggaggttgccagtgatgggaagtagcagggagcctgcatctgctgcccctagaaggaagcccaggcagggttgttcagtgggaggtactggctttggaagtagataaacgtcggttcacacaaacctgatctttagcaagacacatctgtgaaataggaataatattacataccttgagcgggttgtgcatattgaaccagatgggaggctattactgccatttcagtgataacagagacagtcaggaacaggaagacccatgaggagggagcccacaggccaagtcagcacccgcccgcccctagtccccagcacaatgctaagttgcagtgcccgactgttctgctcagaactggaacagatgggtccttgtaccaagcaggtccattccccaaattgaagtcctgtgactccagccgccaaggctgcaggcttccgtacatgaggacccaaaaacacaagctgacttatggggtccagccctccagcacttacaaagctcagccacccgcacgcctcccttcatcagcaccaccactctaaggaatgcggtccctttgacaggcgaaaaactgaagttggaaaagacaaagtgatttgttcaaaattgaaatttgaaacttgacatttggtcagtgggccctatgtaggaaaaaacctccaagagagctagggttcctctcagagaggaaagacaggtccttaggtcctcaccctcccgtctccttgcccttgcagttctgggaactggacagattggacaactataacgacacctccctggtggaaaatcatctctgccctgccacagaggggcccctcatggcctccttcaaggccgtgttcgtgcccgtggcctacagcctcatcttcctcctgggcgtgatcggcaacgtcctggtgctggtgatcctggagcggcaccggcagacacgcagttccacggagaccttcctgttccacctggccgtggccgacctcctgctggtcttcatcttgccctttgccgtggccgagggctctgtgggctgggtcctggggaccttcctctgcaaaactgtgattgccctgcacaaagtcaacttctactgcagcagcctgctcctggcctgcatcgccgtggaccgctacctggccattgtccacgccgtccatgcctaccgccaccgccgcctcctctccatccacatcacctgtgggaccatctggctggtgggcttcctccttgccttgccagagattctcttcgccaaagtcagccaaggccatcacaacaactccctgccacgttgcaccttctcccaagagaaccaagcagaaacgcatgcctggttcacctcccgattcctctaccatgtggcgggattcctgctgcccatgctggtgatgggctggtgctacgtgggggtagtgcacaggttgcgccaggcccagcggcgccctcagcggcagaaggcagtcagggtggccatcctggtgacaagcatcttcttcctctgctggtcaccctaccacatcgtcatcttcctggacaccctggcgaggctgaaggccgtggacaatacctgcaagctgaatggctctctccccgtggccatcaccatgtgtgagttcctgggcctggcccactgctgcctcaaccccatgctctacactttcgccggcgtgaagttccgcagtgacctgtcgcggctcctgacgaagctgggctgtaccggccctgcctccctgtgccagctcttccctagctggcgcaggagcagtctctctgagtcagagaatgccacctctctcaccacgttctaggtcccagtgtccccttttattgctgcttttccttggggcaggcagtgatgctggatgctccttccaacaggagctgggatcctaagggctcaccgtggctaagagtgtcctaggagtatcctcatttggggtagctagaggaaccaacccccatttctagaacatccctgccagctcttctgccggccctggggctaggctggagcccagggagcggaaagcagctcaaaggcacagtgaaggctgtccttacccatctgcacccccctgggctgagagaacctcacgcacctcccatcctaatcatccaatgctcaagaaacaacttctacttctgcccttgccaacggagagcgcctgcccctcccagaacacactccatcagcttaggggctgctgacctccacagcttcccctctctcctcctgcccacctgtcaaacaaagccagaagctgagcaccaggggatgagtggaggttaaggctgaggaaaggccagctggcagcagagtgtggccttcggacaactcagtccctaaaaacacagacattctgccaggcccccaagcctgcagtcatcttgaccaagcaggaagctcagactggttgagttcaggtagctgcccctggctctgaccgaaacagcgctgggtccaccccatgtcaccggatcctgggtggtctgcaggcagggctgactctaggtgcccttggaggccagccagtgacctgaggaagcgtgaaggccgagaagcaagaaagaaacccgacagagggaagaaaagagctttcttcccgaaccccaaggagggagatggatcaatcaaacccggcggtcccctccgccaggcgagatggggtggggtggagaactcctagggtggctgggtccaggggatgggaggttgtgggcattgatggggaaggaggctggcttgtcccctcctcactcccttcccataagctatagacccgaggaaactcagagtcggaacggagaaaggtggactggaaggggcccgtgggagtcatctcaaccatcccctccgtggcatcaccttaggcagggaagtgtaagaaacacactgaggcagggaagtccccaggccccaggaagccgtgccctgcccccgtgaggatgtcactcagatggaaccgcaggaagctgctccgtgcttgtttgctcacctggggtgtgggaggcccgtccggcagttctgggtgctccctaccacctccccagcctttgatcaggtggggagtcagggacccctgcccttgtcccactcaagccaagcagccaagctccttgggaggccccactggggaaataacagctgtggctcacgtgagagtgtcttcacggcaggacaacgaggaagccctaagacgtcccttttttctctgagtatctcctcgcaagctgggtaatcgatgggggagtctgaagcagatgcaaagaggcaagaggctggattttgaattttctttttaataaaaaggcacctataaaacaggtcaatacagtacaggcagcacagagacccccggaacaagcctaaaaattgtttcaaaataaaaaccaagaagatgtcttcacatattgtatttatatatttatatttatatatatatttatataatggtacaaaatggctgggggtgtggccatggatggagggaagagtaggctggcctgtggcgtgggtgggaggagaggggacggagagggcactcggcccgctgcaatctgacccctctctcctcagggcaggaaacacagagtcagacagtttgggggggtcttgggccaggggtggagggctcaagggcacagggcccaggctgaggcagggcgggcaaagcgcctggcaggatgaagggcaagtggccccccaaacacagaggccctggccatggaccctgggaggtgaccggggtgagtcaggggcctgttgtcagccccagaggaagcgctggacctggccgatggtgggccgagaggacagcaccaggctgggagaagtggggcgagttccctttgtattacagctgccagtgcaagaccaggccctccaggccaggaaggctagggacgggtcctggtagaagacaccctgtctagaatggcccttggtcctggaggtggggcgcaaaaggcctcagccagggaactgccctgccacctcccgaggcaggaaaggaagtgagaaaaggagaagtttttttactcctggggccaaagtagggggacaaacacccagtcgtatatggcttcagctctgaccaaaggcggatagggagctctcctgggtaggagcagggagccaagggggaggcagtggctgtgcctgggtgggcacagacagatctggtacatggccctgagccctgggcagagggacaaccttgccggtgagtgggcaggcagagaggaggcggcaggatgctgtttccccgattccatcctcagggagtggagactggaggggaggtgcactgactcagatgaactgttctcccccttctttgataagaagtaggtggcagcagcctctggaaaagtcagggccctggaggttacctggcccagggctactacagccacaggccccagtggcaccatgccaccccttccatggctccactcaagggggccacacagccaccgcctcttcctcctttccttcatcccaaactgggacaaaagacttcaagttctggctaagatgtagcagcagcggatgcccgggcatccaaagtggaaagccagggccccgtgtcaccggtgtgggcaaacacacatgcacgtgcacacatgttctccctgaatcactcagcagcagacaggctgccgccctgggggtctcagccctgctagggctcaccaggtggaagcctaggtggtctgacctcagtttaggagtgggtcatttacgtcatcttaccatttggggacgagacaggaatggtatcccttagggacccagagacactgcaaacagtgggtggccatgtagggctgcatgtccctgggtccaggggaatggagggagcaataacttgaagaaggggggaagggtttcttttatccttttttttttgtgtgacttctatcaaaacacagaaatacagcacacgcacaaaccagcacaaaagcgcagcgctctatttacagctccggctggcacctgcccacctggccagccgcctgcagggaggggtgggagaggggtcagccacatcagcagggaaaggatacgaagcaggtaaagacagaaggaaaatgggcgggtgcggagaaaccaagagggaggtggagctccagcaatgcggacacgaggagacaggagcagaaggggctgggggagacctgacctgtccttcctctctccccccagattcccatccaggactccaaaagcatagctgaagggggtgtggcgggtgcagggatgcacggaaagaggtaaaatagagaggctccataggaattgggaggagtgggggaggggcagtcctggtggccgaaatggaaccaaccccaatgcaaaatcccccaccccacactgccacttccccctaagctgccagcacatctggtttccacaaatgccactccctacacaagccccctcccaccccctccaccccaccccgcgacccaggccatcccaacattgaggggaagaactttgttaaggttatcgtatttgcaacattgccccggctccagccctggcagcgacttctagaagggcaggttggccatgccgcctggtgccgggaggtagcccatctggctgtccagggacacactgcgctgccgaagggggtgggacaccatgaggttctgctggggcggggggcccatgagggagccctgcggggagagcatgtggggcggctggctgtagacctcgccccccacgccccgctgcttcatcagcatgaaattctgctgggtcatgaggccttgtggaggggacatgaccccctggtgcaggccatggggcaccatcccctgctgtgggggcacgcctgtcctgcccagcaaggacatctgtccagggtggcacatggacatgttgagcccccgctggacgccctgctggcctgggaggttgggaggccgagagggagtctgctccgccatcatgttctgcaggttcatgagatgcagattagggggctgagccttggggggctggttctcgctcttggggaagtactggagggtgctgcttggcttctcagaggggatgatcctcgacaagtcgaactcggggatccccgttggggtgggccggatcacctcgctcagctcggggtcgttcagcactgatgccaccccagggagcacacccggtgggtatgcgtcgcccatgcgcccagccatggctttgcccatcaggtgctgctggggaggcatggggcctggcggctggttgggcaggtcctcgggaggcagggccatgcctgacgggtagtgctgctgcaggccaggccccccgcccccacccccagtgggggccatggcaccatggggctgctgcagccgaggggggaagggcatcatctgggaggagctgggcactgggccacagggggcattcagggagtcggggccccctggggccatcatcatggagttttgagggggcccccctgtcccctgtgcgttgggatgcagtggaatgttggagcccagaggggtgggggagggcagcatggcgggcgggggctcatgggacaggggctgctggcctggcaggttcatgcccatagggctctgggcagcggctgagttcaggtgcatctggctgggctggctgttgctgatccctgtagggaatagaagacagggggtcaggcacggtgtgcccagctcggggagggtgcagggctcaggccttccccactcccaagccagggggtgccagaggtcaaagtcttcaccactggcttcccctggctgggagggaagggactggaggcattgatgctagaagccaagagaccaagttctggcccagttcgccagacacaccaccaggtgttggaaagaccactcgagtgctctgggctgggtttccctaatgactccagcgagtgggaacagcatcccggagcctccacccccacacccagggccttcagaggcacaaaaaagccagcacaaccacagctgtgctccccgctcccagtgcccacaccagctggcctccctggggccctggcctgtcctcgcacctggcccggagccctgcggtggtggtggggggggcagcaggggccggtcgggcagcagctcgtcgtctgaggtggcgatggtcttgatggcattgtggtagagcggggtggagctgggcatggcgtacttggacatctgggtcatcatcagtgacagggggttctgggaaggtgtggggtctggggaggaagtgaatggtaggctggggttcatgaggccgctgggagggttggcgggaggtgctgaggagctgctccgggggccgctaggcgggagggtacctacagaaacggggagacaaagagagcaggggtgactggggaggggcagatgagtttggctgtggatatggggaggtttaggaagcggtcagttccccaaatcacctggtccttcagacacacccacaggcccccactatctccagagcccaccagtcttcaagcaattcctgcagcctcagggccccaggcaaggggaagatcccaggccccaagtacgatcactcaaaatgcctgggagactcacgtggtaccccctgagaaagcccacaaatgtcatcatctgccccataagcagagccatccacctctgggcccgtggtacacaggcccttactcactcactgcccagccccagcatggacacactgctcagcgcctgcctgcctgcctgcctgcctgcctgcgcaattgactcaccctgttccatgttgctcagggtggtggaagagttcatgttgagaggcggctgcttgttctgggagacccccgggctgggcatggccgtcttaggtgaggcaacccagcctggagaaggcaccgccatggaaggagacttgagcctgctgggcgagccagtgggtgaacggacactgagggaggagccgaggacctggggcgacttgagaggtcctggcgggttggcagaaggcaagggcaccatctgtgagggagtctggggtgacttgaggttggcagagggcgaggtgaccaggggtgagtgcacctggctaagggtgggcgacttcaagtgccccatgcccggtgagcccatctgattaatactgatggtgaggtccgaaggccgcctgcctagcccccggtttggggctgaatgcacggtcccaggaggattggacgcagggggcagaggcatgtggctgagccgggtggtgcccacgttgctcatgggcattgagctctgatcagggctgaacatgtcttgggtattgcccatgtcctgggacatggcttggtagggtccctggcctccagagaatccctgctggccctggttgggaaactgtgaaggcatcagcatcttctgcgggccgcccatcacgccactgctgttctgggcccgaacccgggccatctcctcaggactgaggccctggggccccatcaagtccccagggccccgcatcttctgcgacatcagcatctgctgctgcggggtcatctgcacgttcaggttcatgttcatgttcatgttgacattcatgttcatgttgaggttgcctggccccatgggtgggtccacctccctcagcccagactgccccatgggagggctcaggaggccccggcctccaccaaactccatgcccatgggagtgcccgccaggccctcaccaccagccatctgcccgggaaacatggcaggatccatctgtcggtgcgcctgcatcatccgctccatctccatgctctgtcccatgccactgcctgccatgcccagggggcgctgcatgcccatcgaccgcttctccagcagctggtgccgcagcagctcctcacggacccggggagtcatgaatcgctccgcctcaccctgcccacctgggtagggcatggtgttctgggcaaaattgctgggtccccccatagggggcaagtcttcggtccagcccatgcctggtctcacgggcctctgcatggcattcatgggcacctccatgggcatactctgcatgcccccaaacccaggtacccgttgtatctggttgcctgggaaacggggcccaggaaagggaggtccgccccggagctgcatgggatcttgaacatccatgggcccccgcagctgcgcacccattccaggtggccactgatccccaggcttgctgtggtaaggaggcgggggccccctcaccatcatgccccccatgcccatcatgtcctgcagaggacggctcccatgcagcccaatctgttcctctttccgccgtttctcttcgtagtactcctcctgcagcttgcgccaggccacctgctcaggcgtgaggctgtcctggcccagcctctgtatcatcatgttcatctgctgccccatgtccccacccggggggtgcccaggcacttcatgctccagcggggggccccctaggctctgtgtctgtgaaatcatggactgcaagggttcctcatatttcttcagcccgctgggaggggccgtgggtggctgctgggggggagggggggcttgtgctggtgggcccccctcacccgctcctcctgggggccccttgaggaagggctcagtctctccgctgcggagcagcagtcgctcaatgtctcgcagcgtctggagggaccgttcccgatgctccagctgctctttggacaagccctctgagcccaccaggctgcgctgcccatttccaggggcggctgcctcccccagcagggcagggccgggggcactgctggggtctcctccaggaggcagagggttgttggcggtggtagccgtcggggtgttagggtgggtgcccccagtcccaccacctgtgctggcagctcccaccgagttgggggccaggtcctgactgctgtcctcaggaggcccctctgggggcagagcaggcggggcactgccaggggccgggggtggcggcggcggcagtggaggtggctgggactgcggggtgcctgctgacggcgtgctcaggggtagcggttctggggtggggggcactttaggggcctgcagaaggacaaagagagcatgagacaggtaaggggacgttccacccagtcctgctgctcacagaggcgccacgctcacctggtcaagcttggcccggggcacgttctgctggtggtaggcgaggatggagtcggcccggccctgcagcactgcctctgcagccctgcacagagtgggggcaccgacagctcagagaggtgagcaggagggagccccaccctcacccaccccaccctgcccctgcacggggctccctcggaaccccaggctgagaggtgctgggcagagagagagagagacttggcctgcccaccaggcacttacgtgttggccaggtgggtggtgaagacatatacgaactgcgagggaggctttccggggacgcccccgcccccgcccccgcccccaggggcatcaggccgaaggccaggaggagggccgtgcggggcgcctggcacgctgctctcgctgaggggcagttgggtggtttggccgggacccagctgtggggccgccatggctgggtctgctacattacaatctgcaggagagaggacagggaaaggggctaagtggtctagatacaagaaggaccagctgatgccccctcccactgatgctcacagccttacagctcgtgcccacagggacatttgatgtcagtatctggtgttctcaccaggctggtttccacgatggcaagagtggtgaccatgtggagagcagggacagagaaaatgtgtcctctccacaggctcccatgggcctggcattctgctggggacttaacaggtgtgatttcatctcatcaacacaccctgggaggaacgtgtcacacactccacttaacaaaggaggaaataagttcctcacccacagttacacagccagttagtgcagagccagaactgaacccagggccgggactctgaagctccgctctgagctgctgcccctctcactgggtaagtgtatgtgcacacagtctagtgacccagttagggagaaggcagagagggtacacaagctgatgatccaaatgatggatggtttttcactctagccccaccactaactgactttgtgattttatgaaccagacatccctctaagcctcggtttcttcatctataaaatgtaaaatactaacctcctccttgcacagggggcaggccaaagaaatatattttttaacagtaagtttaaatcaatgtcacagactaaaaaaatccatttgaaaaacagagagccgggagcggtgtctcacgcctgtaatcccagcagtttgggcggtagaggcgggcggatcacctgaggtcatgagttcaagaccagcctggccaacatggtgaaaccccgtctctactaaaaatacaaaaattaactgggcatggtggcgcatggctgtaatcccgctactcaggaggctgagacatgagaattgcttgaacttaggaggtggaagttgcagtgagccgagatcacaccattgcactctagccagggcgacagagcgagactgtctcaaaaaaataaataaataaataaaaataagaaagaaaaaacagttagaaaaagctgacatactggaaacactctcaagacagaccagctgccctcagcaccaagggaagttttgttccatggttagacacttgactgtaagtcttagcgtagaaaaaaatctacaacgggtctaggtgagtgggtagacccattcgcatgccaagaaaagcaagtcacagttcctggcccgcagacagtaagtaccagcattctcagttaatgggagacagattgcctgaagttgtctccatccagccagggcagtgaccaccttcccatgggcccagtgtcaggctgccctctttggaaaaagtttcttctgcaccttcttctctgatggacccaccccaaaacggccctgctctggaccctatctatccaattttacatagaagagcagagccagaaatttgcgggggagcttgagagctgacctcaatgtgtgaaggctgctgagtagctcttggatacgagctatggggagacaggcagggcttagtccaacaaggaactttctagtacaataacaatgataaaagctaacatgttacatgtataacctcatttactcctcataccaaccctatgagataaataatacttttacagatgaggaaactgaggccctttcccaaatttacagaaataacctgggttgcaaacgaaggcagcctgatggcagaactagtcctgtcaatgtctacgttctatcgcccctccagtaagaactcttcaagaatctaagggcaggccgggcacggtggcttatgcctgtaatcctaacactttgggaggccgaggcgggcggatcacttgagggcaggagttcaagaccagcctggccataatggtgaaactccatctctactaaaaatacaaaaattagccaggcgtggtgacgcatgcctgtaatcccagctacttgggaggctgaagcaggagaattacttgaacccaggaggtggaggttgcagtgagccgagattgtgccactgcactccagcctgggcaacagagtgagtgagactctgtctcaaaaaaaaaaaaaaaaaaaaagaatcaggccgggtggctcacgcctgtaatcccagcactttggggggctgaggcaggtgtatcacctgaggtcaggagttcaggaccggtctggccaacatgctaaaactccacctctgctaaaaatacaaaaattagccaggcgtggtggcaggtgcctgtaatcccagctactcgggaggctgaggcaggaaaatcgcttgaactcaggaggcagaggttgcagtaagccgagttcgtgccattgcactccagcctgggcaacaagagtgaaactccgattcaaaaataaataaataaataaataaataaaagaatctaagggtagtacgactaaaatagtcgccttgagtatgggatgttagcaatttctactttgtatttccctatgtttgccaggcacagtggctcactcctgtaattccagcactttgggaggccaaggcatgaggatcgcttgagaccaggagttcaagatcagcctgggcaacatggcaagactgtctctacaaaaattagccaggtgtgatacatgcctgagccccagctacttgggagtctgagatgggaggatcacttgagctcaggagtttgaggttgcagtgagctgtgatcacaccactgcactccagcctgggtgtcagagagagaccctgtctctaaacaataaataaataaaactcacaaagtttctacaatggtgcagtctgatgtgacataagtgaactggaggtggtggctatggggggaggtgtctggtctgggaagcagtaaaggcttctatcatcaaagggttcagccagaggcttggcgaccaccaggttagtcccacgggggagagagaactgatacaggatggtctgtgaggttccagctagctgtagaggtttggtatttgaccctctacacccctgtcacagacatagtctgctcactccataacatttgctgactctctctcctcctctgtaattggcatcatgataacactgacctcacagggctgttgtaaggattaaataaaacagagtagcaaagtagccaatgtactcttttctttcttctttctatggtccctgccttcaaggagttcacaatttaatagtctctggctagtttctttttcttctttctttacttctttcctttctttctctctctctctctttttagagatggggtctccctatgttggccaggctgttcttgaactcctgggctcaagcaattctccggtttcagctccccaaattctggggattacaggtgacagccaccacacccagcctctctggctagtttcttatgtctctctcctcaaaaagatgtaaacgtaaactttgagggaaaaaaaatatgtacaagcttcccaggggcaggggttacatctggctctcccccatcactcatggaaggacaagatataggcgaatccataaaagaatcagaggaggagtgggcatccctccacacccacttcttgtcctggtgacacaccctgggtacttgccaggagtcaattagaggttagggaagggcactagagacacggccaagtggcaactcacacccaggcttagcagggctttgcacagcagagccaactgcccggctcccagtgtccctggacgcttcaccgccctccctccactaaccagtaggtggcagcataggccaggaattcacaggtagaggtgcaggtgacgtgaccaagaaggaggccactccactctgccccacctagggtccctagggagagggggtcactgagcacctggaaggcagaggcgaggcagttgcagtgtagggagggacagagtctgagaggtaggatgggagagaaaaatccaggactcccagtcctcacttctttcccaggctcagtcctctcaagtccatcccccaggaacatcacgggctacagcaccctggcatcgacaggcactcactgtgggtggccccaatgggcttgtcgtcctcctcactgtccggtccagagcaccattcgtccccactgtacggctgcttccgctccagcacacagcgccgcttactccgcggcgccacctctgcccaggcaggacggaggaaagagtgagtgcctagaggccccattattctcccacacccagggtccctcccagatccattctctaagatgccccaccctagagggcactgcccaggccatggtgggcacttcgccagcccgtggcccccaccacgccaccatttgtttctgatttctctctatagccccatgcctgtctcccctcccccccaacaccaagtacagcataatccccaaccacaactggttctaattagggctggaggggagggggagctgctgctactcttccaggccccagtgcctgctcccaaagggctcccaccagccgggatacggaggctcctggaagtgtgtgggtctggggtctgctcctcactccatggcacctccctctccccttctggagctctggtgggaaagcaggaggggaaggagtccagaagtccgaccactctgtgtggcccctccatgggtggcatcatggccaaccccaatcccgaatgatctggttggtgggtgttgaaaggtacccatgcagaaatactggagaagaacgtgggatgaggactggacaagcagggagcagagaggtgatctcccagaacatctgagccttggactatgggagatgctagggtcttagggatgaggaaatggggtacctttggcctctgaatccagggatggggtcccagcctctcgctgctctccagagtccacagacacactccggtccctcttcaccttgcccttgagcgagctgaaagggggcacccctgcctgggggttcttcagacttgagttgctaggcgagatctggttggccttggccccatggttccccgcccccacgcccttcgagcccacgttgcaggtgggtccttggttcacattctggtgctgagattgggccccgccattccctgtcttgccatgattggtcaatttattttctgggtgcattggcttggctggggcaggggggcaatgaccgcggggggacagcggcgggctccctggagcttctctcctcctggggtggggtaacctgggaggaggtgggagaaatgtgaaaagttaaccttgctaggggctaggcatgcctgcaacttaattaccccatcctgcctcccctaacaatgggggagggtggggggaaggggtggtatctcaagaccaccaccagctattctctacctccctccatggcttcctcagacaagggctgaagccctcatccaccttggggagtggagatggggaaaccctccaccccctagcctccacaatttgaatggaaaccagggcctagagttggcagaattcacccacctcagccccaaaacacccatcagcctgcaagcttctgtggcaaccctgtcctctgtatcagacttaagcatcctctcttctaagatctgctgtcttcagactccttccaaggtctcaaacctcaactcccatatgtcccaacaccagcagagaagggccacaggacctggggtcactgcacatgcccgggtctcattccccagggacagtgggaaaacgcacaccagggagtgctacccactggtccagacagctggaggggaaggcctgaggaggggggcttggcaggccaggccggcaggcagaagcaggaggaaagggggaggggagcggtgtgtcaagcagatggggagtgtagcttgaagccaaggattcctgcagcctaggctgcgggccctttaagctccagcccgctccccccgccgcctccccctccccggagacctattaatagccgctggaaagatcacatcacgggagaggatatttatcccccctcattccacaccagctcagatttatttcagctctgctgtcctgctgctgccgcctggccctgtctgccggcttctccggggaggggggagggaggcaggcaccgccccctactccagctcccacctccagctagactgaggccagaggcggccttcggaccccacagtagggtgggagggggtctgctcaaaccattttaaggagggaagaactagaagggaccagaagccgcaagcatagctggctgccagtcccctctgccccccacccaggcccaggcactaaggctggctgcgcctcctgcctcgggccaggccttcccatgctaacccccctttagcccactggtggcctgggagccaggtgcccagggcggctcctctcctggccagcacagcttgggccccatcaccactgggcccttcccttcccgcactccacacacacacatcccacccgccacgacacccacacaccttgtcttgttagccaggatcctcatggctcccacacacagtggggctacggcccctgtgcgtgcccagggcccagccaggtactcggtactggagcacggactgcagcaacaagccccaaagagaaaactcgtgacttggggagggggtgtcagagggggaggggagaagggaggacccaacagccctgggactagggagctggatagggtggggtggcactggaaaaagaggattacgagatggggtctcgatcctggaggccagccctgtccccatccctcccgcaccttgccctcagggggcttgcagtctccagcaagcctccgccccgacgggcggcagagacagaattcactaaaaggctaggtagcaaaggtgccgtgtggggcggctgtgaggtctcccctggccccctgagggattcctgctcccagacgcgcccctcacccagggtggggtacccctcgtgccccacccccagagcgctccagccgtggagggggcccggggttggggccacgccccgccccgtccccagctcgaggcctagcccgtgcccatcccagcaggcccgggcgggcagcgagaggcctggcggggccccggggctgcagctgggctcttctggagaccagtaacgctggctcggattcctccccgaccgcaagaatgcaggagcctcccctccccccgccctgcacccccaccccgcccccttcggcagagcccgggcggagaggcagagcgagcgagcgacagccaagcgaggcagcgagcgggaggcggacaggactgcagcgtgcttctccaggccccgcgcgcggacagacacacggacaagtcccgccaggggctgggcgcgcgccagccggcaagagcttggcgagccccgggtgctgccagcagaggctcagagacccacagacacccgaactctgactcacacacactcacagctcacacgtggacagggagacaaagacacgcacggagcccaggaagctagaggcgcgccgaggccagggaagcgccgccggagcgggaggcgcggagacagcctggggcacgcgcagacaccggggctgcccgagggctgagtgggagcgccggacccattgaacagatgaaaagactgaggccggccacaagagagccgaagaaagttgagcctggtagtcacaaagaaacacgcacagggccatagatacagcaacagacttacacaaacacagaggcctcacccaaccgcccccagccctggctcccccctcgcctcccctacccgccctccagcagccctccagcagccgatcccggtcaaaggggaggagtcttgggcccaggagcttcgtcccggtgacaggcccggccagacaccggtgcacactcctgatgctccctgcggggctgctggaggctgggcggggacctgggggtgagggggccccacctgccaccctgcgggagtctaaccccaacttaaccctagggcacattggccttcgccactccagccgtgtctctggggaggaaggctcctgggggaaggttccaaagtccaggacctgcctgggaagcagcccgccacccccagcttctccatcacaaccagggaagagcagaggcagaggctggagtcactgagataccagggctctgagcaggctcctggctggcatgcatctcaggctctcccttcaccagctcgctgattctcaaaaggatcgaccccatttcaacgaggaaactgaggtctgggaaaaggaagtggcgtgaccttgagtcacatatccagtatgtggcagtgtggggacggaccctcattccagacactgcagtgaccccacctccccacgccagccatgactgctcctctgagcctgcatcagatagttgggcttcccacattccagccacagtgcccaggtcccccataaggggggaggggcagggcaagggccactcactacctatgttcacagcctcaaaaattgagaacctgtaagaatttgggaaggggctattagaaaatcagtcctctccagtggccgttcaggcctaggctcctccccagaagactcttccagtcaccctcccctccgggactccaccccctctctcccaccccgccgcagggcgagctgagtcaagcgtggatgagtcaggactttcccatctcacacctcccccctttgcccctcaagagtctgccccagctcccgaagacccctcctcctccacacactcacagtctccgaagacacctggaaggcctggtgatgggaagccaagagggctgatcccagcccaatgcaattttaaagcacccagtgaagggggcttgctagtaccaggccaggggcccttgaggtacgagaaagcaaagggatggggctctgggaacacgtcaccgtgcctccctcttagggggttaggtggggaggggtagcaagctcacaaacagggagcaggtgcgagtcacctgagtggaaggccaggcgcataccaggagaatgaatcggaggagcggaagaggcggcttgacaaagggcctgagatatccatccgctcccccaccccgagtgacgcgagggtaggagctagcagcctaagggttgctaagggttaaagtggacttgatcctagctgggggagggagctgaggaaggctcagatgcccagagcctccaggtatgacacaccggctctgctccacacacaactaccacaggtagggcaggcgttcacacatccagtggcaacctgcctgctcctagctgcccccacgttgggagcctctgcttggctcaccagctggcccagcagtgtcactgcctagctcaaaaccaccccaaagaggcagtgaggaaatgttttggagggttcatgctcctgagctgccagggccccctgtgatgacgtgaaagcccaggaccctgctggggacaacagggcgaacgagatccttggcctctggctcagggagatacagcgcccgagacgacagggtcccaaatcccctttctcctgggtgtcaggacccctcagtcctcagaagctctctccaccactcaggtcacttcctcttcctgaggtggtgactcagcgggcagggaggtcaaggattcgtagcccagcaggaaatctgctcaaggaccaaggtgctgctctgggaccctcgatgtggggacttccaggcttagggggccttcccatggccctggttcctagtagctctccacacttcccccgactctgtgccaaaggagaccatgcaaatcagccatttttgcttgggaggttttccctgggagtttccagccccaccccacctgcagccctagggtaatgtcagacaaccccagctccacaggaccagggaaactcctggtcccagacctttctagtctgggattgttgaacagggtactggggggtgatcggcggttttgcccattctggcccactgtcccttctggagcctgcacagacaagtggcattgcttggacaggcctgaggtcacctcacttctcttggctcctacagtcattgtcagtgtggccgggccttgggaagcaatcatggcctggcagtggggtgcccccaaagacagctacccaatccccagctgctccctcccacagggggaggggtagagagggggtggggggcacaaggaaacaagacagggcaggaagcccaggcaggcggcgggcactctgggccaggcacaaacaaccaacacaggaaaccacagcccacccccgcccaccccacccgcccaaggctctgggagagaggagtgccaaaagcttggtaccccaacagaggcaagggccaggggttagcccagggcaagggaggagcaagaagctctccagtcctctctctgccccagaccctacctggggagggtagagggagccaggctggcagggatggtgctgcctctttaaatccaccgaaatcctgagctaggcccaacctagctctggtttcacaggaaggaaaggagctcaggagccagtagggcaggcagtggtggctggaattagccccaccggcccaaatatatctggtctctgcccgccgccccactggtacttcctgtcccctggcacctgcaccagggtgggggtaggagatgatccaggtgccactctctaccctatggagactcccatctcaggaggtggtgtggtgctgggttcacatgggtagaaggtaacttcccaagcctgggttcccagaacaggcagagatgggcaaggcagctccctgtgggccctcacctggcctcagtcctccaaggggttaatctgtcccctatttaggggggtaggggtggccgaggaacctcctccaaactgcctggctgctgggaacaatggggccattgtgggaggatggagtgcagcagactgctggcacagccaagcgcaccacggtgggacctcacccagcgcccgcccgcctgcctgcctgctctgctctctccccaggtacagccagaggcagaggcatcctcctggcccctcacctcccctgatggctcacactcttggcagcagcagcacctgggggccccacgagctctgcccacattgacatccagactgtcatgaccctccaggatgcaggggcacgtgggccaggccgggaggggtgggggtgatgagacaggatgtatgcctgtgacctctgcagggagacagaaggccacacggggtttctggtgtcagtcctggcaccctcaggcaagaaaggcttaggggattgtgagagcagtgacaggcagggtcccctgtccccaggcctcctctcccacacccattcagtaaagctgctcccagaggaggtctggtgcctggtggcctcgccctctgaggttggggccctggcaggcagtatgatgcagtggaataagaactgagtttgagggccgggcgcggtggcacacgcctgtaatcccagcactttaggaggtcaaggcaggtggatcacgaggtcaggagttcaagaccagcctggccatgatggtgaaaccctgtctctactacaaacacaaaaattatccagacatggtggtgggcgcctgtaatcctagctactcaggaggctgaggcagagaattgcttgaacccaggaggcggaggttgcagtgagctgagacgcaccactgcactccagcctgggcaacagagcgagactgtctcaaaaaaaaaaaccaagtttgtagtcagacagtgtcaatcacaccctgccccttctcatctatggggccttgtccttccctttatccctctgagcctcagcttcctcatctgcaaaaggagaataattttatagagtgaggtaacagtagtgaaactaacagaatgcctaagacacaccagcccttgacaaaccacttctggcctcaatttccttatctctacctcctgccatggcacccaaatatgtgggcatttggtaaaggcaggcactgtccagatattttccctgtgagtgtccaagagaacagggcctgtgggcatcatattagtggtaccaagtaaaaagacttggctcctcccctgccctcctctcagaggtcagctccctccgctggcacactcctgggcatcctgggctcaccgacacactcaaatccagagcatgaacccagagaggggctgggtggctgtccactctcttagcctcaggaccatgtctcaaaagtccaggaggcaagtgaagggggatttcccttcaagagagccagcctcccctctgccaggtccccttctccctgcctgccccttggcagtcaccctgtagtacttgggctgggagaaagcttaagcctactctcttgccatggatctcaaaggaagggtctgggagagaaagaacaactgacaagcagttctggaaagtagggggcccagggagaaaacctgttctcttctcaactagacagggctgtatctctcagggtggccccagaagcccccaaagggttaacaaggccctaaaaataacctgcgcccagcaggacccactgatcggaaccctccagccatctgttcccattttctcgtgttcacattggaacatctgaaaccggccccagagccccagcccgatcccaaaaatagccccagcctgcccaaggaacaggccccaggggctgggcacaggaggcatggccagtccagtagcaaggcatggcccaggcagaccctgagccctcatcccccaggcccatggatgggaggtgtcctctctagatccagaggaacatgataagcagagccaggggctccagcccacccctcttggtaccaagccagagagagcacctgctagctaagtccaggcctcagacccaggggccctgggatcctaggcacttctaccacatcttagtccccagaagattttacccaccttgtctgcatagcttccccacctcattgtgggcaccccatccctgccgcccactcctgggctcctcatccagaagttcccaagcctcagcccctccaccatcccactctcaccccagggcctataggagccctggccacctggccccactcagcattctcccttgccagcacacagggttaaggcagaacttttcctagcactgtccacactcccccttgcagctcagggaaggactctggaggtgtcccttggacgctgtagatgctgatattaccccactccccttctgggcttcaggatgccccctccctgaccatctgtgtccagcaggtgacagacaggcccatcggggctcccccacatgatcataggtctgggcactgcccctcagagaaatgcccaggcacggcacagggaatccggggtccagggccctgaggtgttcctaacagctgccatccaggtcacagctccacactgacacttctctccccaagccaggtccctgacccctaggccaggaaggagaggaggcggccatttaagccatttaaggacggaatgtcttgtttgcctggtgagagcagagcagcaggggatggggcagtgggaggagtgctgagctgaactgagcaaacagcctcagggaggagggctggccctgggaagcctgaagatagcgagggagacgtgtcctaagctccctgggccttctccaggcccctggctatttggcaaacttgcaatcaagaagtcagcaggcaccaacgatggggaagcggcggcagcaaacagtggatctggaggggtattagaatccaggaatctggagtgtggaaaggctgtctcttccccacccccacactccctctctcaccatcaattctttccctgctaaaacccctgggaggatcaaaagttcctgtgaagagctctgactaatcaaatgaggggaggatcaccaacatttattgagcatttactttgtaacttcaccagtcctaaatgcttcacgtgcatcctctagtttaatcctcagaacaatctggtaagaaagtattcttattatcctcactttcccactaagaaaagggacatgccgagaagttaaataactcgcctaaggcccataattttagaagaagcaggatttgaattcagacaccctggcatctgggttctgggccatttcacaatactccagatgcaccacagtatcagtcctctgaacgatgacgaaagaaagcatgggtgtccaggccccaccctctcactcctcacatcctccctccatgcctgatgtgcccggggcttgcccagggaagatcagagagagagcaccgctccccactccctcaacccaggtacccgcctggcctggcctgtggtgccaggacagagcaaagttctccagcctcccccagccccgcccaactccagtccgttacttcctcacccatccttgtccctgccggtcagaggagggcacaaggctagtcaccgagacaacagcacagagcccctgccaagagttaccacgggctcgtgagaggccccaggtgggggtcaaaggtcaagtgggactcaccggtgagggtggagtcccagccctgccccccacccacctgttcagccacacctggccaatgctccccatctctttcattcctcagtagagagcaggaccacttccttggtgtcccttggggggtggcttcagtggagaggttcggggctgaggtgaggggatgagaagcccctccctcctggggatggtctaggagaagtgcctcctcccagtccccagcttcctccagctttccctagtcgaaccgggagccctcaggcgtgtttgttgtgaattcagggagttgttgctaagtaaggaaggggggctggcggagggaagaggctgtgtgtgtgtgtgtgtgtgtctgtgtctgtgtgtctgtgtgtgtacacgcacgcatgtgtacgctaggggaccaggggccagggcagaaaccacactactgtggctggtagccaccctggctttgactgagccagaagaggccaagccagcgaggaggagcaaggacttgggataaccaggaagttgtaccttgccctccagggcgattgggcggaatctccttgcctcccgcagggtggggcgggtggggggtgagatccgctgagatagagaagggctggactctcactggagcctggctctaacccctcccagcccggccccactccccacctgactgggtctagggttctggtcagcctgtttgcccaccaggagccagaggagacctccctcctctggagggaggggaatgaaaggagagatgggggcagaaagccaagagaagggagcccaaaagacaaaacgccaagcaggaggctaagccagggtgacgcggccgccgcggacagaaatcagggaggctgagagggacacacaggggcacacagacctctcacctcaggaataatgtcgggctcaggctcaagggtgtggtctgggttgggggctccctgtggagagagggtcaaagctagaagcccccttctagcaatctatgtccccgctcctcccatcaccccagcaccccccacgaacacaccacagaaacatgtacacacagtccacacagcctgcagctccaggaagtctctgagctactcaattgccaccccccacccccaccaggacttctgtggattggctgggagccaagcctgaccccagctgcaccgctgcccccccccccccgaccccccaacccccgcccaccacaccatcccctccctagcctggaagcaggagaggaggaggcactggaagaccttagagctcccttagagcttggccccacggggaggaggagaggcagaggactcccatgacctggcctgaggacctgggggaggagagggatggggaggttggaggaccccagattctagcaccagccacctccaggttatcctatgtcagggaaaagaatggctgtgtattctatgtccctgtgtggtctccctggctatagccctggttccctgaagaggccaagtcctgaggacctggtctggttgggaggacctgggccgagggagtcggtttagcaattcagtaggagggggctgggcgaagctcccacagcaggcgggagagaggctggtggctgggctcagtttgtactggggggtcaaaggggagttcttttccgaagaattctgggagagacgccaactagagcaagctgctaaccacccctccctctctctcactgcactgggcggggggtgtccctgccaaccagacttaaccctctccagcctgtgttcctcccagacctgagatggggtctgctggggaggagaccttcggctgggctcaactttccattctaaggctcatacagagcagggcatctaccagcataaggctggttccacatggccccgtctggcactgccctgccctgccgccacctaggtgacttttctgagctcatctcctaaaggtgtctgcagtgacgtgtgtgcgtgtctcagagacagagattgagaaacaagctgaaaattccttgcccaggccctccccctgctgggtcactgagcactgtaccaacctgtacccctcccttcctcccactgtgctctgggaccagaggccactgggggtggggacgtaaaagggacagcttatccttatgtccacctcctgctgctgtctccataggtctctgactcacacaatcagccccggccccagcactctgcttcctcactgatttgtcacaagtgcttctggagaaatgcattccattcccatcctgagatcccaggatgggaaactgagatgcagcaaggttatgggggttctagtgcctgcatcccatgcactaactctgctatcaccgtccttgctttggccccaaatcaaaaaaccctaggaacctcctctaatgtagaatactgtctaagtgcagtaggagggaatgagattaaacatcaagaaggacttcccacgatcgatcaaggctacaagggcagctggccccaccccagatgcctggattccagacccctccgtcttctgctcaggctggaaatatgagtgtcttctcttgtttagctatttgaccctagctggagaagtcaacttttctgaaccttaaatttgccaccaagctcccaagtccaatgtgattggctgttccttgccctcaatgaacaagtgaccccagagtgggggcttagctccctttccccaccccttttcctttagaacaccgagcctctctgtaacaaccaccactgtataatcaggacaagaagaggtggacaggtggtatgaggaccctacaaggtgctaggtgtccgtgaggggtagagggagagaccccagtccccagggagagtttatcacaaagtctccactgcaccactctctctccaaggaccacggaactgccagaagccttggccccactccaggaaacttccctatcaaagggcagaggactgcatgtcccagggagctgtggggagacctgtgactacataccccagacatgttcccagggaggagagaggagggaagagaagtgaagcgcatgtgtgtgcccgcacacgcacatacacgtggacgagacacgcccccagcacacacactctccagaggtaccccggacacttacaacacagacacaactcccaaagatgcacatccaaagacgtttcctaaaaagcactccaaattctccaagagtggccccttcagacccacagaggctcccgtattcatagagacagcctaggggagctcaggaaacacacatgacatcggccaatcacacagaactgccaaacagaaccgccgacagaagatacacccacactgagacacacacacacacaaacttatacacacacacaaagtagtacgcagccatgtgctagcacacaaactcagacacacaaacttgcagcgcagagtgtgtgaagtcggattagaaggcaatgctctggggaggaggggagcctgcagggggtggagaaccactcagggatttcaaaacaatcctggtttcgaaatgctggaaatgctggattcagggccattccgagttgaggctgggggtggggaagtggagagtgaggaggaggggaagacgggccagcccagggctaccagtccattggaggaggaacgggaacggacagagggagtcccagctctggtggaagggggcctagaataaaacaccagggttaggagggggaccagtccagggccaagcagggagggcctgggctgcaaaggagaggcctctgcttttgccactgacaggaaaagtgagaaggcaggggaagccgcccctcccccttggcatggagaatcagagggaacctgtctgtgtcctttcccctactcctgggcagtggtgaccaccttctcccctccagagtggcaccctggctccccttccccaccagctagcacagccccaaggtgggtggaaagctaaggggtcacaggggatggggagatggcaagggcctgcaggagtcaggggtcttccacaggttccaggaccccccacactcagagcaggctgtgggcatccccctgggaacccaaggctttcttcctctccacaaggatgcgggaccctcggggagactgaggcagtgtaacacatgcccacacccaggaagtcgcccctcccacggcagccagaatgcccttactgcccctcccccagcctccagggaaagtcaggctgagttctcccaggaggggagggaggggaggtcaggccaggctgggggtggggctcagaggcctggccctggcaccaggcagaggaaattccaggctgtaagtccaggcagccttcagggccgccgagccaagtgacatgcaccagctcaggagctgcagtgctctggccttcccctcctagccctggccttccagccctccaactggctccagccccagctctgggactcagataggctcctcagccctggcaggagctcccaccagccccatcccggctcctctggccagttagagcttcccttcctcagttccctgagggcagcccccacggtgtgtttgtgggtgggcagctgtcggggctggcaggcaggggcacacatgcggagctagagcagccaggcgctcaacaggttgagccagtccatggaacagccggccccaccccagggagagcgggcctggcagaggctccctgcccgcggcacccagcctgtacccgcttggctcccacggctgcccactttcccacggtgccatcccccttctgccccctccccccatcggaggtcagcacccgggcagtgcccagggctctggcacaaggaaggaagggatgccattcccctgtcacccctgggtgcccaggctcttgagctacctcactctcagcacccaaggagccccagaaacagccagcatggcagcaggaccacaagaaccccaaaggacttcccaggcacctccttgtgggcctcttctgattctgggaagactggaaacttgaacaccccagctctccagagctgtcccagggtcctgggacagaacttcagcgtgtggtaccagaggcagtgtgggggtgcccccagctcctcctattggactccctggaggaggggctgcagagctgggtgacagtggctctcggactccctggaggagggctgcagagctgggtgacagtggctccctccactcctgccccggcagctgctgctgcaaccctggtcctttcctcccactccactcctgggctccatggagctccatcgcagtcactcccctgataggcaggcagctcccctttgctcggcatctcctttaatctaaagcaggtgccaggcattccagcccttgctgagccgacactgccaccccctaggcccctgcccagaggctactgtcctgcctggtctggaagttgagaccccagcctagggctcccgcttaacccaggtaccaggactccaaaggcaggaactagctaagcagggtcatgggtacccaacacagattcaacaggcaagatcaataggtcccaaattgccactgaggcgctagatttctgtggactgccaatccctctctaggaccctgtagtatctctccggtcccatgactccccatcctagtagagactcattctgaacctccatatgggcctccagaacccatcaccagtcatgggaccccttctactccaggcacaagagtcactctggatccaagattttaggtattctacctgcccctcagcacccttcctgctgtgaaccatcaccccaccccactcaggagcaacatgggtaagcagggaacccctagagggaggtggccagaaggctgcttccaggcctggctctccaaggccaaggaggcaaatcacctgggggaggcggcaccttccttcctggcaccagcctcccagtctctctccctgctcctcaccttcctcacccattctctccctgtcctgtcctgaggcctctatcagcagggcctcagagctgacaccaggaagacagggcctgagcatgctcctcctctggggtcatgaaattgtggtcctgacctggagaaggtagcccggcccatgctgagaggcagcagaagagcaaggcagcccctgcccggaagtggctgctccctggagagaccaagaagagaaggagaagacagtggaagcccactcactgtggtggtctcatccagagagctgctcagaggcagcagcagagttggagcagatacagggcacagtcagctttcacactaaaccaaggctgggagtgagggcagaagatccagggaggcttggaacccctttgtgagggctcaaacacacgcccagttcacctctctcagagcaacactttttctcctcgcagcagaggttcccccagacacagacacagacacagacacacaccccaagcagtagacagaaagagaagggagagagggggtgtcagaaaaacccggaaggaaggaagctggacagacagacagtagctgatcctagcttcattgctccagagagacaccctccagactcctagacttcaagggacactatccttctcagaaggagagagcagccctctgtctcttctgaaaccaaattccagcagccctggaataggacctaccccagcgcaacaagaagcctaagctcacttctcttcctacattcttccccgagggttcctttggatcaagacaggggccacctccccttagcagcgcagggacacttccaaggaactgtatgactgccccaccccccagccaagcccacatcactcagaagccttggaagaagagactcctcagtcacagcccccgctactcacaggcagtgcctgggagaaaagggtgacccccagctctccccagtcccaacccacctccttctggaggctcctatcagccagaggaggagggctggggtgctgagacccacggggttggtgagcctgggagggggactacatctcccagaagcccccagggcaaggttcgctgctccagctggcccaaggccggccttgttctctgcgctagggtggcagggtcccctggctgtccctaagccctccccacggtgttctggagctgccaacctgattgggggcttaagagtagcctccactgaccctgggggagtcccccacaccttaaacagcctgggggtacgtgccagagagcaagagacaatcagactgtgtttcccctccccgattcaaactggatctccctcctcgcgcctctgctggcctggcatgactttcgccttgcccccagcccacccctcacctcacgcggattggggggtcctcacgccaggccggagctggacgccatgaccaggtcagggtcgttgtgtggatgggggtcctcctgctcgccagttggagatgcagagggggcgggcaggcggtgatcttttgatcctggacgccttgatctcaataccagcccggcccgggagaggctatccggggatcgctgggtgcctgggttcctgcctcccaaccgcggagcatggtcgcgggcgccgggcagtggcgggagagcgcgcacacccgccggggccggggcgcggggccggggtctcggccccgaacctcagggctccggctcctgctcctgctcctccttcccttgcttgcttgcttgcttccttccttccttcctcgcctctcctttcctttccccaaagcccgcgggaatgccgggcgctgggtggggaggggctgtctgggcgcttattgttggtcggactccgagggtccgggtcacagcccccgggcggcgcggcgccgggggacccaggcgtgcgggcgtccggccggctggctccgggcggcggcggtggtgcagcggccccgggtccggggcatgtccagccactggctccgccgcgcgccgccgcctccccgggctcccctgcgctgccggagcctcgcttgcccctccactcggctccactccccagcctgaataagcatcggggctctctggctgcctccttctgccttcataccagagcccggagaggcccctgtcaaaataagagctcccccatctcgcttgcctcctcgcccaacccggctcccccagcctcccagtggtctgactcggtaaggcgcccggccggctagcgggaggcaggttggcccgggggcggggaggggggtttctgctctcctcctcactcctgagaactggggaggagacgcgccaacaacatcccaggctagggaaaggtttgacaaacctaccttcctatctgcactgattggaaggagtggaagttgcctggacacacgcgcgcgcacacacacacacacacacagcactgggtcccctcttcgttgtacccacccacatccataatgcactgagcatctctttattcatgtctctcctagtagaccatgaggtccttgaggacacagactgagttttttcatctcaatcctcagcagcacaaagtgcatgctaagaaaatgtttgtggaagtgaaacctttgtcttctcaaaagaactctcctaacctaacctcaaagtgcttctctctctctctctctctctcacacacacacacacacacacacacactctcaccaccctataggacgatcgaggcaatgaaaaagaaaatgtaaagcccttttttttttttgagatggagtttcgctcttgttgcccaggctggagtgcaaaggcgcggtctcagctcactgtaacctctgccttctgggttaaagcgattctcctgcctgaacctcccaagtagctgggattgcaggcacctgccaccatgcccggctaattttgtatttttagtagagacagcgtttcaccatgtcggccaggctggtctcgaactactgacctcaggtgatcaacctgccttggcctcccaaagtgctgggattacaggcgtgagccaccgcgcccggcccaaagcgctttttaaaaacatttcacatgtttcaatgctcaccacaaacctgcaagaaagaggttatggtcccattacagaggtgaggaaattgaggtttgcattacctaaggacttacccagagctacccagctagaaagtggtaagcccaggactagaatttgggtctccttatcccagggcactttccctgtttcctactgtccccacccacccagaattaatagcaagtgacaagcattgactgtgtctgataggaagaacactagccagcctgcttgttcctgctgtttcctcggccctctcccctgcccctcctcacagatggtccccagatagttctagcctcactgacctccctctcttctgaccacctatcccatcataggatctgagtacttcctgatgtgttgtatcttgtcacacacacacacacacatatatatatacacacacacacccctatatatgtataggtgtatgcacacacacacatatatatatatgtctgatttcccccaaaagattcctaagggccttgaggggttgatggtgccaacagctgggcactggacaaggtttagggaggcacaggtggaaggggacaaaaacctgaaagaagataacatagtaacccccccccatgtgtcccatcactgcttacaaagcattttcatgcacgttgtctcatgatgatgctttgatccaatcaccaaaacttttccaagtgccagcctgctgtgccaagcactgtcctgggttagggggttgaatcaccacagtcctgagaagtcgattttatccccacttaaaagaaaagaaaaccaaagcccagagaggcttctaatgtgaaagatcccagcacctaggctagtacctgacccatggaaataaggtttaatttcttatctcctctccagaaagacataatatgggcccccacttctccaacagggtgcttcttagaggggaccactgcatttatgtggatcagtctccccttacatatatgacaagccaaaggggcttgttatgatctctttggcacaattcctggttcgtagtaggtccaaaacagtgtttgcaggggcaagtgagtctgtgttgccaggggtctcttaaatggtgcacaatacatgtcctatggagcagccacgcggagcgctcccctgggtggggctgtgactcattcccccagcggaggttccaggttgggattcggagctgagctctgggcagccacaagttctgggtggaaccctggagagagccaggaggaaaggagagaggcagggggcccttgctggaatcgagcggctccctctactggccaactcggggaacctctgtctttccgtgtatctgtgtgtcactgtgtcacgaggggtgtcacaggtgtgtcagcgttggcgttcgtcggtggaagtgcccgcatgggtatgggtgcgtgagggtgcccgttcgtgacgcagtgtgggtgtgccagcgccacgaggggctgtttctggaagcacagtgtgtacacacaaccgtatcttgtaatacaatttactttggggctgctgggggtctgagattaggcatcccgttgccggggttactaggacaaaaggattctccagctggtactcctcaccggctggagcactagcccgagaaggtgggaggagtccagaccaaacagttcctgaaaaggactctatcacctaaagcaaatagggacccaagaaagagttaacgcagagccccacagtgacttcaatcattggctcagggcactgtcagtcagaggtctgggggcggggtttgtggggcctccatctgactgcccagcgcccctcacttgcccctcgacccccacatcatctcactgctgggctgcgcccgcacccccatcttggtggcgacaccgtcctgggccctggaggaagagccgatccgggcatcctggcttccccactcactccagctgcctggcttcctgatagatggtgattatataatagacttgctggacagaaccgtgccagcgctcggaacactttgccccctcctcgaagcctgccccagggcctggcacctgccacacagagcctgctgccgggttctgccggcgccccccagcaacgcctccatttcggggtgggagaccccaggacaaggtcctgggatggggcgggcgccaagcggagagaagcagggcgggtgccccgcgggtctcagggtcggcctgaggagtgtggattcacaagcgcctctcaggatagtgggacccgcctggccccttccaacctgagcttgcaacttgggagccaatagaggagcaggggccagggtgggaacgggaaggagtttggaaaaggtgtgggggcaggaaagggaggctgagagagggggccggctggggcaggggggagggactcttatccctcaccactgccgccttccccgactggagggtttggaaaaactgagcaggcagcaaggcttggctggaaatcctgcagcccaccctcctggggacacaaagctggagggcgggggcagggcggggggagagagcacgaccccggggaggacagggcctcttttggggctgggggcccaggggccggaccctggggagggggttcctggcgctgtctccctgcagtctgcttcccccttctcctctaccccctccgcttccccctcctccccctccgcggctccagtcttgcagattgcgggcagacttaactccttgagtgccagcctggtggactcggtggtggtgacgctgtgagggagggaaggaggagggactccggaccccactcccacccacagtttaacaccttgtgccccggaacgcaatcccggaactggttgggttccagtgccctgaaaggctgcttggttctggagtcgccacacgcaaaacaaggcacctgacggttcgggaatcgcccgctctcttgcctaatcttccctgcctcccctccccaccgccgcctcagggactctccctccactttttggctacccttcccccaccccacccccatctccaagttgcagccgacagccgaggtccctgccagattgaagcaggggagcccggaagtctgggttttgtagctgcctcagcgctctcctctacatcccacttctgaggcccagcgcaggtgaccgcagcccatgcctctcttgcccccagaggggctgcttcacccatctggggggctaactacccaacggaggcagggaacgctagcctcccctagctccagcgaggactaaggacctgagtagctggaaacctgacttcacctctaccctagcccctcccctagcgaacagcccctcccccgtcctctgtgaccctcaactctgctgtggatgactctgccgagggaataccgcagactaggcaggaaggggttaacgcagctactgcgctcgaatggagcgccaggtgaggcaccacccatcttggccttcaggtgtgtgggtggggaaagaggagggacactgaccttaagggctgcttttttgccccctggtggctaaatctggcttagcagccgctggaaaaaatacgctcacatggggattcgcggaagaagaacactggcgacgacagtagagtgtrcctcttgcgggaacagcaccttcctagggaaggagatcgttctgggaaggctgatggaaggagggagctcccacagtccctgccacaccatcccgctcagtaggctgcctcagccaattccagatccttgccctaggggctctacttgtgggtcccaaacacctggaggagggtaggaaaaaaacagaagatacaggccctgtcctcccagggtctccatctaatagagagggtctgtaggaggaagttgctcctaccttttccttccgtgcctcaggccttcccagagcacccattccctccagaccccagcatcaaatacaaaccagccaggcttcaaagctcctaccagctaccccaacccccttcagcttctctcccctccagccaagctgatttctaggwccctccctgtaaaaagactccacttgagggattccaggtgttcttatccccaacatggctgagacccttcctcccatctacccaaagccctccctgattagcaaagccaatcatcttgaagggctccttccccccctccccttcaattgccttacttttctccctgtccttatttcccactactttcctttcaagacttctttttgcatgggcagttcacccaattggggacaattctgtcctccttgtaccctgtgatacctcaatagttgccttttctcccagctcggtggcaagccctgtagtcccagctagcaggcaggaggatcacttgaccccgggagttctgggctgcaatgcattatgctgatgggtgtccacaccaagttcagcatcgatatggtgacctcctaggagtgggagaccgccaggttgactaaggaagggtgagctggcccaggtcagaatggaacagattgaaactctggtgctgatcatggtgggattgggcacacaagcctgacaacaccaggacaccctgtctctttatttattttttcaaacaccaactcaaaccagatgagaccttgtctcttaaaacaaacaaacaaacaaaaaaagtcttttccttcaggaatccttctctgaccaaccccacctacttattcatccaacagatatttattgaggacctgctatgtgcctggcacttgactagacactaggttggtacatgttggtgacatagatgtttgtccttttcctcacacagcctgcagcctagtgggggtcagacaacaagtgagtgggtgatttcaattcagtgtgggcacatttaggggaagtggacascaatcccagacttgagagtttggggaagcttcctgcagggaccaactgtctgagctggaacttccagcatcaggtatggttctgtccaggcaaacagtacatctcactagagctctaaagatagaataggaggctgggtgtggaggctcatgcctgtaatcccagcactttgagaggctgaggtgggtggattgcttgagtctgggagttcaaaatcagcctgggcaacatggcaaaactctgtctctactgaaagtacgaaaaaaaaaaaaattagccaggcatggtggcgcattcctgtagtcccagctacttgggaggctgaggtgggagaatcacctgagtcaggggtggtcgaggctgcagtgagccgagatcgtgccactgcactccagcctgggcaattggagttagaccctgtctcaaaaaaaaaaaaaaaatagcatcccaccaaaggctctccaccagttgttatgagaggcctctaaggcggcgttcccaaacaatgctttttttgttgtttttttccgagacagagtcttgctctatcgtccaggctggagtgcggtggcgtgatctctgctcactgcaacccctgcctcccaggttcaagcaattctcctgcctcagcctcccaagtagctggtagctggtggctgggattacaggcatgtgccactacgcctggctaatttttgtattactagttgtgatggggtttcaccgtgttggccaggctagtctcaaactcttgaccttgtgatctgcccacctcagcctcccaaagtgctgggattacaggcatgagccaccatgcctgacccaaacaacccatttctggtttttagttttttgtttttttttgagatggagtctcgctctgtcacccaggttggagtgcagtggcgcggtctcggctcactgcaagttccacctcctgggttcacgccattcacctgcctcagcctcccgagtagctgggattacaagcgcccaccaccacgcctggctaactaatattttttgtatttttagtagagacgrggtttcaccgttttaggcaggatggtcttgaactcctgaccttgtgatccgcccgcctcggcctcccaaagtgctgggattacaggcgtgagccaccacgcccggccccaaacaacccatttctaattctccaagtcccaaaagaactttgttctgagagtccaaagtacaagaccttggcctagtcacttcctgtctctgggttgcagcttcttcaagtgtaaaacaagaggcttaggtgcctttatcttcatgcccttctttatcctatagatagcgattaaatagttggcttgttgacagaaaaaccctcacttagctctcatctgcatggggctaccagagctcataaacccaggagaagctgtcataggcaggacctcagagaaagccagttggtcagtcacctgtgtctcgcccactgcccccttggtctggcagttctgcgtcctgggaacatttcattcttgctgctaatggaaggcaagaggctttccgagattgtgctggaggggagagcatgcccacaatatatttagttactgtattaatctgctctaatatgtagcactataggactgttatttttgagagagggaatgttctcaggtgaggaaactgcttggtgaaggtccagagtggtgaaaggactcgcctaaaagcatagggttggtgctgatagctggaagagcctcctgattccgtgtccagactctttccacgacaccacggcagcacttgatccaactttccattggacttcttcctgtgtctggctcatttccctgtgaggccatacgatctgggaaggcaggctcagcctccttatctggacatcccccagagcctggaggggtgctcagaacctgccatctcccaggccctccttttctctctcatcatgaccctgtttatatttatgtagctctcttactcattctaaaaagccttccctggattgttgacaaagccctgggccaggcacagtcccaatcccagccagatctaaaacctgctctgtgacttaaaacaaactgattcacttccctgggccttgtgttctccatctgtcaagacctataacctggcggggcacagtggcttacgcctgtaatcccaacactttgggaggccgaggtgggtggatcacttgaagtcaggagtttgagaccagcctggccaacatggtgaaaccccgtctctactaaaaatacaaatattaggcaggcgcggtggctcatgcctgtaatcccagcactttgggaggccaaggcaggcagatcacgaggtcaggagattgagaccattctggccaacatggcgaaaccctgtctctgctaaaaataccaaaaaaaaattagttgggtgtggtgatgcacgcctgtagtcctagctactcgggaggctgaggcaggagaatcacctgaacccaggaggcagaggttgcagtgaaccaagatcgtgccactgccctccaacctgggctacagaatgagactccatctcaaaaataggccaacctattctaactcctaaggcatttgtaatctcagctctgaaatcccaaatcaggaagtgtttttaaaagacatagctctgccgggcacggtggctcatgcctgtaatcccagcactttgggagacctaggcgggtagatcatgaggtcaggagtttgagaccagcctggccattatgatgaaaccctgtctctactaaaaatacaaaaattagccaggcatggtggcatgcacctgggaggctgaggcaggagaatcacctgaacctgggaggcggaggttacagtgagccaagatcgcaccattgcactccaggctgagttacagagcragactctgtctcaagaaaaaaaaaaaaaaagacatagctctgagataagggaataagcccaatgcttctgtcttcctgtagggtctcacaacctcaggaatacatctgctttatctgcagggactagggtgctgctttttttttttttttttyccccagaggtggttgtctcactatattgcccagccccaagttcttatccttactagtcattgtacaaataatacaggtacctgccttcaaggggcttataagatggggacagtgagagaacaataaaagatgctgaataggccgggcgcggtggctcacacctgtaatcccagcactctgggagccctaggcaggcaaatcacctgaggtcaggagttcaaggccagcctggccaacatggtgaaaccccatctctacttaaaatacaaaaaaaattagcctggcgtggtgatgcacgtctgtaatcacagctacttgcgaggctgaggcaggagaatcgcttgaaccagggaggcgaagattgcagtgagccgaaatcacgccactgcactccggcctgggaaacagagcaagactccatctcaaaaaaaaaaaaaaaaaaaagatgctgagtaattaaatcatatgaagtttatgcagtcagtgcaaattgcatcctcaggtagacctggtggagaaagagaaaactgacctggagctggaaagacaggccagggacagagtcacacagagggctcggtgaggggcagggaaagagcaaaagcaggattaatgtcaataggaagggagtgaatctcaaagaccaactacctagttcaagttctctttttttgtttttttgttttttttttctgaaacggggtctcacttcgttgcccaggctggagtgcggttgccacggctcactgcagcctcagccttcctgggcttgggtggtcctctcacctcagcctcctgcgtagctgggactacaggcacgtaccacaacacccgctaatttttgtattttttgtagagctggggttttgccatgttgcccaggcttgtctctaactcctgggctcaagcaaccctccctcctcagcctcccaaagtgctgggcttataggtgtgagccactgtacccagccttcaaactctttctgatggttacctccctgccaacatctctggccagcagtgtattagcatcttcttcttttttttttttttttttttcttgagatggaattttgctctgtcaccaggctggagtggggtggtctcagctcactgcaacctcgacctcccaggttcaagcaattctcttgcctcagcctccctagtagctgggactacaggcgtgcgccaccatgcccagctaatttttgtatttttagtagagacaaggtgtcaccatgttggccaggattgtcttgatctcttgacctcgtgatccacccgcctgggcttccaaagtgctgagattacaggcgagagccacggcccctgtccatcagcgtcttcttgaacacctttagtaacagggagcttactgttactcccaagacagctcactccgtttatggacatctgtttttccttcctcaaagctgaacttcatctaccagtggtctccacggaactaaacttcattttgagataatctcttatctcctggtggtccgtgcactaccttttgggggtgcacactgtaaatctaattcttcctccccatgatagcccttcaggtatttgagctttagtggtccctactctttctttttttttttttttctgagacagagtcttgctcttgttgcccaggctggagtgctgtggcacaatctcagctcactgcaatctccacttcctgggttcaagggattctcctgcgtcaccctcccaagtagctgggattacaggcgcccgccaccacgcccagctaatttttatatttatagtagagacagggtttccgcatgttggccaggttggtctcaaactcctgacctcacgatccactctttacttttgcctaaacattcccaggtcacaaaacaatggctcccatcataacacctggccaacttacaataaagcaagattatctgtcttctcctttattccaaataccatatctccagtaacgtgacttaacattggatttgctcctggcagtcatgttatgctgatgtccctttttcttttttctttcttttttttttttttttttgagacagagttttgctcttgttccccaagctggagtgcaatggcgtgacctcggctccactgcaaactccgcctcccaggttcaagtgattctcctgcctcagcctcccaagtagctgggattgcaggtgcacgccaccacgcccggctgattttttgtatttttagtggaaacagggtttcaccatgttagccaggctggtctcgaactcccgatctcaggtgatccgcccgcctcagcctcccaaagtgctgggattacaggcgtgagacaccgcgcccggcctgatgtccctttttcttttctttttttaagacggagtttcactcttgttgcccaggctgcagtgcaatggcgcggttggtctcagctcaccacaacctcagcctcccgggttcaagcgattctcctgcctcagcctcccatgtagctgggattacaggcgcctgccaccatgctcagctaatttttatatttttagtagagacggggtttcactatgttggccaggctggtctggaactcctgacctcaagtcatctgcccgcctcagcttcccaaagtgctgggattacggatgtgagccaccgcacccagcttgatgtccctttttctttctccctatcccctctgccccaccagtgctgatgtcttagactgaacttactaaaaccccggattctttttcacctgaacttcttctaagccatgtctggcccactgtgtattgctgaggtcttacatagatctctgatcactttattctgttaggtttacctaaccattctatacatggagatgattcttggatccttatctttcaatgtttactatccctcaagggttatatctgtgaaatgtgatactatattttcatataagctgttaataaaaatatttaacaggaaagagatggagacaaaaccctaaagtatgcaaatgttcttccgcttggtaccaatccatgtcacactgagaagtagcaagaataaatggttttgtaggtgggatggagtcagatcaaaatgagcctcaaaagaagaaaatagaaaggctcagaaggtttttgagtgaagagtgatacaaggaacaatctggtatagcaaaaaaacaaaacactaaccctggaactcaacagatctggatctgatctacaattccaggtctattgcttattagctgtagaactttgggcaaattaaccgctctgagcatctgtttcttctcctgtaaaatgcgataacaactaccttaggatttattgtgaagattaaaagagatagcatatatgacaagcctagtacataacaggtgctcaataaatgaagaagaaaaatgggagggtgaggaggaggagaagaaagtcatgctcaggacaggcccaggtctagtagtgtctcactctattgcccaggctagagtgcagtggcacgatctcggctcactggaacctccacctcccgggttcaagtgattctcctgcctcagcctcctgaatagcagggattacaggcatgtgccaccatgtccaggtaattttgtatttttagtgggggtttcaccatgttggccaggctggtcttgaactcctgacctcaagtcatccacccgccttggcctcccaaagtgctagaattacaggcatgagccatggcacctggccaggtctggtttctgaagagggactacacttgtggtaaacccaagtggaaagtccacctctgaggctactgtgagggcctgagatgactcactggggctggggcttggtctaggataatatgtatggaatggcaaagggaaggaagcagatctgaatgacatttccaaaggagaattgatccaccttggactcaagtgaggtgtggaggatgacagagagaggagtcacacgtagcaccaaggtttttactctgggtagtgacagggaagtacgaagggggtgatggcttggggaagatggttcatggttagtcactgcattaggcatggcagtaggataccaagtggacatgaccagtgaggaggtgaagcgattcgattagaacttcagagaaagagaagtcagagccaaagttatgttcctgggaagcaccgcatgccagtggtagctgcaggcattgggtgaggtttctgagggtgagctgggaagcgaaccaaggacaggaccctgtaggacacatccggagccatgacttagggctggagaagaaactgccccacactgctttccctccccaccattctctgcctcctggtcagagttgcaaagatcaacccaagctgacacccacccacccactgcatcactgcagacagaaatctgtgcagagcccactggaatcgaaaccctccaggactctgcttttctgtcctgatatcagaaaggacacaagttcttgtctaatcaacagaccccagcttgttgctgcaatcgtgcacttgaaaagggagaggcaggagggatgccacagagagagatgtggacagaggcaggcagggacaccttcgtgaagagcaggagagaaacagaagctgagggacaaaggggaggggagcgctgtgagtacctcaaaaggccgactgacagaggaggagaaaaagagacttaaggagggggcaggagaaaagattcgctgggaagctgatgaagtgcaactgagaaaactgttgccatggtgatgggtccagaggagggagtaggaatataaatcggattatgagttgggggagtctgtatgtgccgagggtgttcaaaacccagatgctgtccccccaacaccaggccctccccacgagatcttccactgcgagaagcctttcccagaggtcctccccaggccaggccaaggaatgcagtgagcagaggcactggagtggcccagggctcagcattccctcccctcctcccccaaaggcccctcagtgatacaaaagagccctgcacccccacaccaggtgcccctagcctcttggagagtcctctgcacagaccctcttcatcagcatcccgaggaggagaggaggatgttgttttaagcacctacttgctatgtggcaagcagcgtgttgggcacttcattccttgttcatttggtccccaccagggctctgtggggtggtattaccacctccattcatagacaggaagcgggtccaggacacaagctggaaggccgcaggcagagggcatgtaatcctggcccatccgctccaaagcccattctttttctcctagccctggcctgcctcacatggcctgcttcccatcccctgctgccatctcctgcacccttagggcacagtgggcatctcgggagctgctcagcggacagactagggtgaggctctaactccattcttggagatgaagggaactggggaggcttgaggcaaatatgccacagccagcgagactccaggctggggaggaggtgcagggcagcgctgagctcagggctggggaaatggggaggaagggctgaggtagagaggccccggggggtggggggaagctccaaggcccagccatttccggcagagcagaaactcccagcatgggccacgtggggagctggggaagctgcaagtctcggagtggtgagggagagcgctgggggtgggcatttccctgcaggtccctgcaagtggaagtggctggagggaggaaagagaggggagcagtttccctccttcgtcttccctcaggtttctgtacaagtaacagttttgcaaagggcaccagtatctgatgtgcatatcaaacagggcctggggaggcgggagaaggccaagctcagggctgcggcctgggcagctgtgccaagaccaccccccaaccccaggaggatgggataggattccaaagcattcccaccccttcccatcatacctggctgttccttctggtgaccatgaaacatcccccactgttctctcaggggaccagcctgagccacaccccaacttggaagtccctgttggggtgggtggggggtcagaaatgcctggactccaagaggggttaaaggtcacaattctgttgggtcccttggccactgggctggagaggccaggtctctgccccacstctccaaaggaggatagggctccttcctccgaaggcctggagggaagggcgtcccaggatcggcttgctttggtgcttcattcatacattctcctccaccctccaccctccaccagcatcccagggaggccctcctaaccctatttccctgtgcccatcagaggttctttcagacaactaagaagggggcccagcaggagccaaaaagatctaaggaagtgcatggggtggcggggtcggggggttggatccttctctttcctcctcctgccctcccgaggccctctggtctcttaccctttcactgagtcctagaacctccacacagccatttagtccttcagcatcctcttgcccagcttagtccctctgattcgcatgccctccagtttgaagagatttccagtgactcctccgacttgccaaatccaaggagcacatttcagcacatctcttcggttccctgtggtcctgatgctgctcgctgtgcctcccacaagcatcttccttgggcacctgggatactgctccctcctggctattctttttccttttagggaagtttctcggtttcctttgcagtctcctcttttcctttgcccataaatgttggggctccccaggctctgtccttcaccttgtcttctcactcagcatccacttgctcctctccaaggcttcagctgttgcgcctgtgctgacctttcctgtgctccagaccacacatccagccaccctcaacatacctccatccgggtgtccttcaggcacgtaaattggcaagttcaagacccaaatatctccacccagcccctcgccacagcctgyccctcccaccccccactgtgttctctagcccctgacggttctgtcatccaccctgctgcccaaaccaggacctgggagcatcctccttaactctgctccccaaaccgcacacaactgtccctgtcaaaccatcactagaccctgtcaattttgccctctgcctagagcagtagcctatgcctataatctcagcactttggaaggctgaggcggaaggatctcttgagctcaggagttcaataccagcctgggaagcacattgacaccccatctgtacaaataaaaagtttaaaaaaatagcagggcgcggtggctcatgcctgtaatcccagcactttgggaggcgaatgcaggtggatcacgaggtcaggagttcaagaccagcctggccaacatggtgaaaccctgtctctactaaaaaaaaaaaaaaaaaattagctgggtatggtggtgtgtgcctgtagtcccagctacttgggaggctgaggcaggagaattgcttgaacctgggaggtggaggttgcagtgagctgagatcatgccactgcactgtagcctgggcgacaaagcaagactctgtctcaaaaaaataaaaaaattttaaaaattagccaggcatgatggtgcacatctatagtcccagctaacttgggaggctgacacaggagggtcacttgagcccaagcttgagctgcagtgagctatgatcatgtcactaaactccattgtgggcaacagtagaagaccctttctcaaaaaaaaaaaaaagccctctccccaaatctcctcttctatcgtttcttgcctaggatctgatttctttttgtttgtttttttttttttttggaggcaaagtctcactctgtcaccctggctgcagggacatgatgcagcctccgcctcccaggtccaagaaattctcctggctcagcttcccgagtagctgggattaccggcaggtgccaccatgcctggctaacgttcgttatttttagtagagacggttttgccatattggccaggctggtctcaaactcttgacctcaagggatccgcccaaagtgctgggattacaggcacgagccaccacgccagcctagaatctgatttttttttttttttttttgagatggagtctcgctctgtcgcccaggctgtagtgcaatggcgcaatctccactcactgcaacctctgtctcccaggttcaagcaattctcctgcctcagtctcccaagtagctgggattacaggtgcgcaccaccacgcccagctaatttttaaaattttttagtagagatgggatttcactatgttggtcaggctggtctcgaactcctgacctcgtggtccacccgcctcagcctcccaaagtgctgggattacaggcgtgagccaccgtgcctggccttagaatctgattttaacagcctttaaaatgtctcccagctatccatccaacacaatctctacattgcagcaagagccatctgtattcaatacaatgtgatcagcacactctccagtttaaaacccttcaagggcttccttttatccttaggatcaaaattaaaattccttaaagggactgtaaaagccttccatcttttcccagctacttctccagtgacttccccaaattctactctgaccctccagcagacccattctctgaccttgtgcctttgcaggtctctcagcctagaacagtcttccctctttctcccctctcttcaccttcctaactcggacttaaattttaggtctccacttagttaccacttcctccaggtagctcttccacactactcaagctcgtgtaagttgccctttagtgagaagcctctctttttttttttttttttttttttttttttgaggcagagtctcgctctgtcgcccacgctggagtgcggtggcgcaatctcggctcactgcaagctccacctcccaggttcacgccattctcctgcctcagcctcccgagtagcgtgggactacaggcacccgccaccacggccggctaattttttgcatttttagkagagacagggtttcaccgtgttatccaggatggtcttgatctcctgacctcatgatccgcccgcctcggcctcccaaagtgctgggattacaggcgtgagccaccgcgcctggccctggkagagtaagcctytttagcaagttatttaacttctttgtgccttaacttcctcattaataaaatgaggataataacattgcctgccctcacagaggttgttataaggattaagcaagaaaatatatgtaaaggggccaggcgcagtggctcacacctataatcccagcaccttgacctcctggcctccaggaatcctcccgcctcagccttccaagtagctgggactacagacgcatgccatcacacccaactaatttttttccttttttttttttttttttgaggcagagtctcgctgtgtcgcccaggctggagtgcagtggtactgtctccactcactgcaacctccgcctcctgggttcaagcaattttcctgcctcagccccctgagtagctgagattacaggtgcccaccaccacgcctggctaatttttgtatttttagtagagacggggtttctactgctactgttttgttttgtttttttagagggagtctcgctctgtcaccaggctggagtgcagtggcgcaatctcagctcactgcaacctccgcctcccaggttcaagagatcatcctcctgcctcagcctcctgagtaactgggactacaggtgcatgccaccatgcccagctaatttttttgtatttttagtagagacagagtttcaccatgttggccaggatggtctcaatcttttgacctcgtgatctgcctgcctcaacctcccaaagtgctgggattacaggcgtgagccaccgcgcccggccaggaattttttttttttcctgagatagagtcgttgctctgtcacctaggctggagtacagtggcccgatctcagctcactgcaacctccacctcccaggttcaagtgattcttatgtctcagcctcccaagtagctgggattacaggcgcatgccgccacacccggctaatttttgtatttttagtagagacaggttttcaccatgttggccatggctggtcttgaactcctgatctcaggtgatccgcctgcctcggccacccaaagtgctgggattacatgcgtaagccactgcacctgtctgaaacaaggaattttgccagcagactgcctttggacttaaactgcaactcttttctgagtctctagcctgctgccctccccatcacatttttggacttgccaagcctccacaatcatgtgagctaattccttaaaatctctctctctctgtttctctctctctctccatatatatgtatacacacacacaaacacacacacacacacacacacacatcctgtttgctctgtttctctggggaaccctaatacagttggtgccccagtagtccccaagctcagctgggccatcaccatcaaatacagccttcctcaaggctatttgtagctgcatccccctcctaacaacaactatttcaagctcttgctcctctctggcctccaaacccttctccctactgagcttcctatttctcagagaaagcagaggcctccagaagggagctcctttatttctcccatcttcctgacttttccaccccagccccccaaaaagcatagcatttttctgcatcattgcccccattcttctctctgcttggaaatgtcaccgttttggycaaaggctaacctgaaccccaatttcttcctctttcagaagtctctcartgaattttactcatctctctcctgcatctttaactttaaaaataaaacacgcagtggtgtgccagtagtcccagacatttggacggctagggcaggaggatcacttgagcctaggagtttgagtccagcctgggcaacatagtgagactcccatctctaaaaaacagaacaaaacccaggaaatcaatagagaaaatcaatgaaaataaaatctggaaaagagttataaaatatatatatttttaaaaagataagcctttcctgtattccaatttcccctcaagttatccgtctctttcctttcctaggcaagcttcttcaaagagctgtctacactaactctagtgcctcaactcccagttacctctgcactcttacaggcagcttctgcctcctcacccgtaagcagctgctctatatgcataacccccaagatactaggcccagcggacattttaatagttcttaccttcaatcctgatcttcatactatttgacacctcttttttgaaactctccatccactccctcctgattttcctcttatctttttctttttcgtttttggagacagggtctctttctgtcatccaggttggagtgtgatggcatgatcagagctcaccgcagccttgaactcctgggctcaagtgctcctcctgcctcagtctcctgagaagctgggagtacagacctgtgccactacatctggctacctcataattttcattcctccttcatcagctcctcttgctgtatctgtcctttaaatgctttatttcccagaattctgtccttggctgccttctcccactctccttccactgctcccctcaaggactctcttccacaggcatgattttaaccagtgccacctcccctgtctgcatcccacacctctcctccatgtttccagaatcctatgctcaatgttgagttgcccaagatatttgtattcattattttttactgtatagtaaattatcccccaaatctagtggcttataaaaataaacatttggccaggtgcggtggctcatgcctgtaatcccagcactttgggaggctgaggcagacagatcacttgaggtcaggagtttgagaccagcctgaccaacatggtgaaacctgtctctatcaaaaacacaaaattagccaggtgtgttggtgggtgcctgtaatcccagctacttgggaggctgaggcaggagaatcacttgaacccaggaggtggaggttgcagtgagccaagactataccactgcactccagcctgggcaacagagcgagattctgtctcaaaaaaaaaaaaaaagaatttatcctgagagtcaggagtttgggagagacctacctgggtggtttgggctcagagtgttttgggaagctgcagtgaagatatcaacctgggccacagtcatctgaagacttgactgggctgaaggaatcggtctccaatcttgctcattcccatacctactgcctggaagtctcacaacctcataggtctttggcaggaggtctcagtcccttgccacacagacctccccacagaggagctccaacatcctccagagtgagcaccccaagagaggatgaggaggaaggcaccctacctagcctcagaagtgatgtgtcatcacttctgttgtatttattggccacacaaaccaatcctgatgtgatgtgggagggaaccatatgaggacacgaatacaaggaagcagggatcattcagagccatgtgggaagctggcagccacaatacctcagacttatcagatccacaagtgaactttattttttttctttttctttttatttattattattattattattattattttgagatggagtctcgcttctttgcccaggctggagtgcagtggcgcgatctctgctcactgcaacctccgcctcccaggttcaagcaattctcctgcctcagcctctcaagtagctgggattacaggcacgtgccagcatgcctggctaatttttgtatttttagtagagacgaggtttcaccatcttggtcaggctggtctggaactcctgacctcaagtgatccacccgcctctgcctcccaaagtgctgggattacaggtgtgagccactgtgcccagcccacaaatgaacttccttctccccagtcctcccttcaaatctgctccaagccatacatctggaaattgttcttgattcttccatcctaaaattactctgcagtcagtcactgattccagtcaatctttccctaaaatcactgcagtctgtctgcttctctccactcccatgttcattgcttggccatgaactttttcacctggatcattttgtttctcacttagtttccctgctttatgtcttacctgctgccaatccattctccacactgttgccagaatgatctttacacattttaaactcctctaaggcttgctaagaaacacgctccttagcgtgggatacaaagccagtggctgtagctcccaccatgcccatctttgaatacttctctccagccaagatgtattgtttgcagttcccagagggtgtcagcataattcacatccctaagctttttcataggccgctccctctttttggaatatgcccttccacttatctcaaccaggctaactctgattcattcttcaaagcccagcaagttttgagagcagaaactgtgtcttgtcctctctgtatctcagaccctaatacagtacccaccatagaggaattgctcaacaaatgtgtgatgagtgaacaaatgaccgggcagttcttgtgtgcctggcacccctgtggcatgcttggcacacaggaagagcaggtccacagctcagtcactttccccctcggactacctttccctgtccaaatagctccctctgcatcagtaacacagctggaaaaacaaattgtgaatcatatccaacttcattccctgtgaccttgggaaagtcatttattgtctctagtcttcttctgcaatgaaggttaataaaaagataaagtgaattacttacattaatgtttattgagccagatactgtgctaggcactcataaataaattcgcttgaggggccgggcacattggctcatgcctgtaatcccagtactttgggaggctgaggcaggcagatcacttgaggccaggagttcaaaaccagcctggccaacgtggcaaaaccctgtctctactaaaaatacaaaaaactagctgggcgtggtggcatgtgcctgtaatcccagatactcaagaggctgaggtgggagaattccttgaacctgggaggcagaggctgcagtgagccgagtcatgccagtgcattccagcctgggcgtcagagccaaaatccatttccaaaaaaaaaaaaaaaaaaattgccttagggagagtcacaatatccaaacgagacaggtttttaaattttatttatttaattttattattatactttaagttctagggtagttgtgcacaacgtgcaggtttattacatacgtatacatgtgccatgttggtttgctgcacccattaactcattaggttcatttacattaggtatttctcctaatgctatccctccccctgccccctaccccatgacaggcccttatatgtgatgttccctgccctgtgtccaagtgttctcattgttcaattcccacctatgagtgagaacatgtggtgtttggttttctgtccttgtgatagtttgctcagaatgatggtttccagcttcatccatgtccctgcaaaggatgtgaactcatccttttttatggctgcatagtattccatagtgtatatgtgccacattttcttaatccagtctataattgatggacatttgggttggttccaagtttttgctattatgaatagtgctgcaataaacatatgtgtgcatgtgtctttatagtagcatgatttataatcctttcggtatatacccagtaatgggatcgctgggtcaaatggtatttctagttctagatccttgaggaatcgccacactgtcttccacaatggttgaactagtttacactcccaccaacaatgtaaaagtgttcctatttctccacatcccctccagcatctgttgtttcctgactttttaatgaccgccattctaactggtgtgagatggtatctcattgtggttttgatttgcatttctctgatagccagtgatgatgagcatttttcatgtctgttggctgcataaatgtcttcttttgagaagtgtctgttcatatcctttgcccactttttgatggggtttttttcttgtaaatttgtttaagttctttgtagattctggatattagccctttgtcagatgggtagattgcaaaaattttctcccattctgtaggttgcctgttcactctgatggtagcttctttgctgtgcagaagctctttagtttaattagatcccatttgtctattttggcttttgttgccattgcttttgatgttttagtcatgaagtccttgcccatgcctatgtcctgaatggtattgtctaggttttcttctagggtttttatagttttagatctaacatttatgtctttaatccatcttgaattaatttttgtataaggtgtaaggaagggatccagtttccgctttctacatatggctagccagttttcccagcaccatttatcaaatagggaatcctttccccatttcttgtttttgtcaggtttgtcaaagatcagatggttgtgagacaggttttataccctttaattttttttttttttttttttgagacggagtctggctctgttgcccaggctggagtgcagtggcgtggtctcggctcactgcaactactgcctcccaggttcaagcaattctcctgcctcagcctcccgagtagctgggattacaggcacctgccaccatgcccagctaattttttgtatttttagtagagacggcatttcaccatgttggccaggctgatctcgaactcctgacctcgtgatctgcccacctcagcctcccaaagtgctggggttacaggcatgagccaccatgcctggcctggttttataccctttttacagcagaggaagctgaagctcagagcagttagtgaggtatgtaacttggcaaaagtcacaaagctggaagaagatttggggtaagtggttgtatcagaggctactttttttttttttttttttttgagacagtttcactcttgttgcccagactggagtgcaatggcgcaatctccacctcccgggttcaagcgattctcctgcttcagccttccaagtagctgggattacaggcatgtgccaccacgcctggctaattttgtatttttagtagagacagggtttctccatgttggtcaggctggtctcgaactcccgatctcaggtgatccaccctcctcggtctcccagagtgttggggttacaggcgtgagccaccacgcagggcggctacattttttaaaatggagcattcaagtctcctccaaccctgaatgactggtattttctcatcctcacagcattttccagcctcaggtctcaaggatagaggtgccaccacttcccaatggaccaacatttggtgagcaccgcatcttacctccaaatccaatcctccaggactcccccatccctggctgttcctaggattatgacaatgatctccagcatttcttccacacctttattttaaaccatttttacacctgtcacatagtttgacctcctgagtaaggaaggggtcttctctttatatactttatttccagctctgtcacccaggctggagtgcagtggtgcaatcatggctcaccaaagcctcagactcctgggctcaagccatcctcccgccatagcctcccaagtagctgggactggaggcatgtgccaccatgcccagctcattgtttttttgttgttgttgtttgtttgttttttgagatggagtttcgctcttgctgcccgtgctggagtgtaatggcatgatctcagttcactgcaacctccatctcccgggttcaagtgattcttttttgtatttagtaaagaggggatttcaccatgttggtcaggctggtcttgaactcctgacctcaggtgatccacccaacacagcctccaaaagtgctaggattacaggtgtgagccaccaccctggcctgttttgtttttgtttttgagacggggtctcgcactgtcacccaggctgaagtgcaatggtgggacctcggctcactgcaacctccgcctcccgggttcacacaattcccctgcctcagcctcccaagtagctgggattacaggcgcacaccaccatacctgctaattttttgtatttttagtagagacggggtttcgctatgttggccagactggtctcgaactcctgactttataatctgcccgcctcagcctcccaaagtgctgggattacaggcgtgagccaccgtgcccaggcttttttttttttttttttaatagagaagagatgtcactatatcacccaggctggtcttgaactcctgggctcaagcaatcttcccaccttggcttcccaaagtgctgggattacaggctgtgagccacagcgcctggccataatttttttttcagttttgtagagatggagccttgctgcgtcacaaggctggtctcaaactccaggtcccaagtgatcctcctacttcagcctcccaaagtgctgagatgacaggcatgtgtcactgtgcctggtgagtctgccattttttatttyattttattgagatggagtctcactctgttgcctaggctggagtgcagtggcatgatttcagctcactgcaagttccacctcctggattcaagcgattctcctgcctcagcctcccaagtagctgggattacaggcatgcatcaccacacccggctgatttttgtatttttagtagagacagggtttcaccatgttggccaggctggtctcaaactcctgacctcaggtaatccacccgcctcggcctcccaaactgctgggattacaggcgtgagccaccgcacctggccaagtcttccattttaaatgtgagaacattgaagtccacctaaagttacatggtatctcatcaacaagaggacagtagctgccatcagaggctgacatggccatgcagccaagtagacatgtttttctaattgactgggaggcagagagtggcactctggaaggagaaccctgggcatgtcagacggacctgggttctgatcccagctctcctggttgaagaactgccatagttcaagtgaaaaaaaaaaaaaaaaaaaaaaggtgccacagtccagaaagaagtttgttttaggagatagtcttctaggctgagcagactagagctgttaagagctccctgagggcagagacttatcttacctttatatccctggtggctagtgcagttccaaggacatagttggtacgcaataggagtgcttgaataggagatttggaagagaggaggcaggggagggaactcaagagagtttagaatcaagaatccaaggaggagacagcctagaaagagtgggtccaagacagagacttcaggcatgtggccctggttcccttactccaagccattgggaaatcctccagaggaacatggtgctgtggctttaactgacttcagcattgtcaatgaatctgctctgctaaaagagttatcctcttgctcctgggcttggcctccccctcctctcagctccccaaacccttctcggctgctgtgatgggataattagatgcgagagctcagcacagatgatgctccagttgcttagcaactaatggtttccatggagaccgcaaagcacagcctccagagcagccagtgagcagctcggcagggcagggagaagacgcaactccccgctcctccagaaacctggggagggctggggtggggaaggtgggggggggggattggagggagaagggagagcttaaaggcacagggccctcttatccctttaaaatctgatcagagatctgccctcccctactccactctgtmccactcataattttagatggggatgggggcttaagagtggacccaactcaacccaccctgcaataaacccaacctcttctttctgcttcttggttgtgaatgaggagaaagacctcccagttcaagtgtaaacaacttactggtgggtgacaggttttgaggagtaccaggaagatcccctcaccctggcattccaccatttaatctgtcccctctctcccaagttgtccttaatgtgcaagasaccctctttccatttgtgcagtggtggtggaatcaaaagccaaggtgcaggaaaaacagaaccaaattcttcacccaaaagcagcctgttcgggcagattgggaaggaacacctgccctgatccctgatgtccgtggaagaggatccagctgggggtggggatgctgtttaccaatacagagcagctggcaacttcaagtgtgggcctttcagaccggcatcatcagtgttacrgggaagtcactagaaatgcagaattgattgggcacggtggctcacacctgtaatcccaacactctgggaggccaaggcrggtggatcacttgtggtcaggagtttgagaccagcctggccaacatggtgaaacctcatctctactaaaaatrcaaaaattagctgggaatggtggcacatgcctataatcccagttactcaggaggctgaggcaggagaatcgtttgaacctgggaggcagaggttgcagtgagccgagatcacgccactgcactccagcctgggtgacacagcgagactctgtctcaaaaaaaaaaaaaaatgcagaatttcaggcttcaccccagacccactgcatgactgcatgagaagctgcatcttaacaagatccctggtaattcatacgcatattaaatttggagatgcactggcgtaagaccctcctactctctgcttaggcccatgagttcttcctttactgtcattctccactcaccccaaactttgagcctacccttcccaccttggcggtaaggacacaacctccctcacattcctaccaggaccctaagcttccctgggactgaggaagatagaatagttcgtggagcaaacagatatacagcaacagtctctgtacagctctcaggcttctggaagttctacagcctctcccgacaaagtattccactttccacaagtaactctatgtgtctgagtctcagtttccacttttctctctctctctctctctcaattttctgagacagagtttcacttagttgcccaggctggagtgcaggggcacaatctcggctcactgcaacctccacctcctgggttccagtgtttctcctgtctcagcctcccgagtagctgggattacaggcacacaccaccgcgttagtttttgtatttttggtagagatggtgtttcgccatattggccaggctgatctcgaactcctgacctcaggtgatccgcccacctcggcctcccaaagtgctgggattacaggcatgagccaccacgcccggctgatctcttttctattttaatagagatcaaactctctgtgttgcctaggctggtcttgaactcctggcctcgagtgatcctcccacctyggcctcccaaagtgytgrgattacaggcatgagccactgtgcctggcctcagttctactacaaaaggaagccagtaccagctaccacccagggtggctgtagggctacaatggagcacacagaacccctacccagggcccggaagacgtcctgactcctctcccctccctctgctcagaactcctctgcttctttctgatgtagcccagggctggaggaggcagtcagggaagttctgtctctttttcatgttatcttacgaggtctcttttctccattctcagttcaacaaatggttgctgcccaaggctgactgtgcccacccccaacccctgctggccagggtcaatgtctgtctctctggtctctccagaagtcttccatggccaccttcgtccccaccctccagaggaatctgaaaccgcatgtgctccctggcccccacagcccctgcctctcccagagcagcagtacctaagcctcagtgcactccaagaattgaaaccctcagtctgctgcccctccccaccagaatgtttctctcccattcttacccactcaaggccctttcagtagccccttggagtattctcttcctacatatcagggcaacttccaaactcatcacccttctgaggggtgggggaaagacccccaccacatcgggggagcagtcctccaaggactggccagtctccagatgcccgtgcacacaggaacactgccttatgcacgggagtcccagaagaaggggtgatttctttccccaccttagttacaccatcaagacccagccagggcatcccccctcctggcctgagggccagctccccatcctgaaaaacctgtctgctctccccacccctttgaggctatagggcccaaggggcaggttggactggattcccctccagcccctcccacccccaggacaaaatcagccaccccaggggcagggcctcacttgcctcaggaaccccagcctgccagcacctattccacctcccagcccagcatggcacccctgctgcccatccggaccttgcccttgatcctgattctgctggctctgctgtccccaggggctgcaggtctcttccatctctggcaggggtgggaagggggctgggggcctggacagggagcactgtaccttccagggctctcaaagagaggtctggacagttgggagtcagggctggtgatggcagtgactgggtatcagacactgggctcagggtacactcctgatcctcctccagacctaggaggcagagaggtgtgggcaaggatccgatgctgcggggaggggtgaggttgggcgctgcccgactcctggcatccaggttctggctctggggaccgcttggtggagggtgcagcttctgcagcccaagcctgccacctggtggtcatactggcacaggcctggctgttctgcccagggttcacagagtggaaagggagatggctccaatgggaccgggccagatctgttggccaggaggggtcagtccccatcggagctccctcctgcctcccatcagacttcaacatctcaagcctctctggtctgctgtccccggcgctaacggagagcctgctggttgccttgcccccctgtcacctcacaggaggcaatgccacactgatggtccggagagccaatgacagcaaaggtctgctaccttctcccaaggcatccctctagtccccaaagaccccttcctgcgacaccctctgcacccttttccccattcatgccttcctgtccacccgtctcctggggtacccacactctaaaagctgccccttctccttggggcctccagaaacttgacccagtcttcccctcccgccacttctgcccagtggtgacgtccagctttgtggtgcctccgtgccgtgggcgcagggaactggtgagtgtggtggacagtggtgctggcttcacagtcactcggctcagtgcataccaggtgacaaacctcgtgccaggaaccaaattctagtaggtactgggtccagcctgaggcacctagggaagggggtgcaggaagagagagaagctagtgtgggggagatctggtgggcatgaggagagggtgagggcacagcaaaagggggtgaaagctgggcctcttggaggagtgcacataggggagacacagctgtgagggtaggtggcccaggctggagcccctcttcctgtaagtcccaatactcactgagggttctctactctctcccaaaccacaaaagcatttcctacctagtgaagaaggggacagccactgagtccagcagagagatcccaatgtccacactccctcgtaagtaacactcccgcctccctttcccatctcagcggccacaaacgcttccctgaccattcctgcctcatccccagtctgggttgcctgtgcctccccgtgcgccctcggggcccctgcttacctctatcctagcacggaaccttcggcatggctactgcacactcagctaaaggttcctcgtgggcagggactgtgtcctcttaacttttcctcagcggctgacataggagatgcttcataaatgtctatgtgatgggtgtttggatccatcagctggttggttggttggttggttggctggctggctggctggctggctggctggttggttgggcagtctgttggctggatgagtgtgaggccgtgagcctcaggcaggctgggggtctctcccgcccacagtggtctcccctctcttttgacaggaaggaacatggaatccattgggctgggtatggcccgcacagggggcatggtggtcatcacggtgctgctctctgtcgccatgttcctgctggtgctgggcttcatcattgccctggcactgggctcccgcaagtraggaggtctgcccggagcagcagcttctccaggaagcccagggcaccatccagctccccagcccacctgctcccaggccccaggcctgtggctcccttggtgccctcgcctcctcctcctgccctcctctcccctagagccctctcctccctctgtccctctccttgcccccagtgcctcaccttccaacactccattattcctctcaccccactcctgtcagagttgactttcctcccattttaccactttaaacacccccataacaattcccccatccttcagtgaactaagtccctataataaaggctgaggctgcatctgccacatgtgtttccctttagtgggctctaccttggctcaaacctgtggaatctatgtccaagctgcaggtgctcctggtcccctccctgccccacagcccagagttacttttcccatgaggcaggcaggggccagtaagagcccagcagtcagagttctcagagacacaccggggctgtgggtttggcagcatccacagtacacagtgggccactcaactaggggtgcaggtcagggcagaagctggggctggtgccccatgtggaggcctggaggcctgggggtgggggtggggggcaggcagagcaagggaagtgctagggaaaagaggagaggatctgtctgggaaaagacaggccaggtgcagtggctcatgcctgtaatcccaccactttgggaggccaaggcggtcagctggcttgaggtcaggagtttgagaccagcctggccaacatgatgaaaccccgtctctactaaatattaaaaaaaaaaaaatagccaggtgttcgggcaggtgcctataaccccagctacatcccagctctcatcccagtggctgaggcatgagaatcgcttgaactcaggaggtggaagttgcagtgagccaagatcacaccactgcactccagcctgggtgatggagtgagaccctgtctcaaaaaaaaaagacaaagacgaggccaccaggctgagacccaagaatggggcattggggtcaggagagagaagaacaggctaaaagtattctaggaggtgagaacgaaagcagaagaaccctggttggagtgggccaagagtggaacagcctagtactgagggaaaaaggcaggagtggccacattccttcacttttgtcctctgcagtatataacatattctttttaaggatcagtgatctttgcattgtacttagggtaaagaccttcaaggccaggcctgatcccgtaactgttcctcagctcttaccagattccctccaatttcccaggctccctcttgcctcagggcctttgcacaactattccatacagccacactgatattggcaccaccccccaacacctccattccggttttcatagttagcttactgtcccttctccagggaagccttctctgacctccattttctcctatttggttgggttccactctcctgtctttcatagcattaccacggtttataaccatgggtttgtgtgattatttggttgtctctcccatcagactgtaagcagttgctttgctcccaagggcatatggtatctttgctccacagtgcctgggacacagcagatactcaataaatgcttgctgaataagtgaacaaacaaatgcacaaatgaatgaaccagcctctaaagagaaggacagagctaggaaagtgcccaaaagaaagaggaaggaaaggaaggaagaaaggaagaaagagagaggtaaagagagagagaaagaaaaagagagagagaaagcaagcaagcaagcaagcaagcaagccgggcacagtggctcatacctgtaatcctagtactttgggaggctgaggcaggagggttgcttgagcccaggagaccagcctggacaacaaggcaaaaccccgtcgctctgtcgctctgacacccaggctggagtgcagtgtctcaattttagctcactgcagcctcaaaatcctgggctcaaacaatccttccgcctcaggtctctgcatagctagaaatacaggtgtgtaccaccatacccagctaacgtttaaatgtttttgtagagttggcatctcactatgttgcctaggctggtctcaaactcctgggctcaagtgacactcttgccttagcctctcaaagtgctggtgttacgggatctctgggatgtcaacttttctggctggaaacctctgtggccatgacgtctttgcctgagttcttgtcatgcatccaggaagaatgaagtatgcagacaagtgaagggtgaagaaaagggtttgtttgtttgtttgtttgtttgttttgagacggagtttcgctcttcttgcccaggctggaatgcagtggtgccatctcagctcaccacaacctctgcctcccaggttcaagcaattctcctgcctcagcctcctgagtaggtgggattacaggcatgtgccatcatgcctggctaattttgtatttttagtagaaacagggtttctccatgttggtcaggctggtctcaaactcccgatctcaggtgctccaaccaccttggcctcccaaagtgctgggattcagttgtgagccaccgcgccaggccaaagagttttatttagagttcggacagcttggaggagtgctcagctcctagcagagaggaggccctggagagggtggctcctctctgcagacaagtcattctgatgtctctgcaggtctctgaagctctcagaagagagggtagctcctctccaccagcaggtcgtctctatggctctcagcagagagggtacaccctccgcagctggttgtcccatcgtcacctgctatcagcagaaagggtactcctttctgcagctggtcgtcaaatcccattgtctctctgccctcttcatcctctggccatcctctgccctgctctggctgagcccagggcttttatggacatcagaggggagaaaagtccataggcagccgtgggcaagcccataagaggcatcacaagtccccactccggtcagtgggactggcagcccagcccccagctttcaggccctccctggcctgagggtggggacttactgagggccccaccccttcccacccaggactctgtctgcctcccactgccattcatgacccctgggcttggccccaaccccgctcctttctgagatcggagcaggtgctgggagcagagagaggccaggcagtgggagcagacacccataagcctgcagggatgggggctcagggtggggggttcttcctggggcccctgaaggtgcagagacaccagggtcctgtgtctgggaggggggccgcagctgcacccaggacctcccaccctgccaactcagaaggggcagggctcctgcttttccctggctcctgcctgcttcctggagcaggaggccgaggtctgcggccgcacccaggaaggcagatcctgcctgttccgggctcccccaaaagcacaggaaggcaaggatccacagctgcggtttgggcagctgtagcctcctgggcagggctcctgcctgctccatagagcaggaggtctgggtctgcagctgcgtttgggtggctgcagcggctcggggagctcccttcccaactcagaaggggcagggctcccattggccccacagagtatgcagacccagccgcggttacctgctgcagctgacatgatgccagcagccacggccatcactgggattacagatgtgagccaccacacccacctacacattatttaaaattgtgacaaaatatacataacataaaatgtactactttggccagatgcagtggctcacagctgtaatcctagcactttgtgaggcgggcagattgcctcacctcaggagttcgagaccaccctgggcaacatggtgaaactccatctctactaaaatacaaaaaattagctgggcgtggtggtgcgcgcctgtagtcccagctagttgcgaggctgaggcatgataattgcttaagcctgggaggcggaggttgcagtgagctgagccgagatcatgccactgcactccagcctaggcgacagagcaagactctgtctcaaagaaaaaaaaaaaaaaaagtactactaatttaaccggttttaaatggacatttcagtggcattaagtatattgacattgcacaactatcaccagtgtccattcccaaatttttcatcatcccaaatagaaactctatacccattaaacaataaccctctactactaatcccttcagcccccggaaactaccattttactatgaatttgggtcactgtaggtacctcatataagaggaattatataaaatttatcctgttgtgtctggcttatttcactaaggataatgtcttcaaggttcatccatgtcctagcatgtatcagaatttcattcgtttttgtttttgtttttgtttttttgagaccgagcctcaaaaaaaggctgattccagaatagctgggattacaggcgtgcaccaccatgcctggttaatttttgtatttttagtagagacggggtttcgccatgttggctaagctggtctaaactcctggcctcaagtgatctgtccacctcggcctcccaaagtgctgggattacaggtgtgagccactgcacctagcagcattattcctttttatggctgaataatattccatcatatggatatcccacatttggtttatctgttcatctgttgatgaacacttgcgttatttccactctttggctattggctattgtgaataatgttgctgtgaacatgggatgcaaatattggttcaagtctctgctttcagtccttttaggtatataatcagaaatagaattgctgaattatatggtaatcctatgcgtaatttttttgagggactgccaaacttttctttttcttgtttttaattttttttttttttgagacagagtttcactcttgtcacccaggctggagtgcggtggcgtgatcttggctcactgcaacctctgcctcttgggttcaagtgattctcctgcctcagctgggatcacaggtgtccaccacaactcccggctaatttttgtacttttagcagagactgggttttgctatgttggccaggttggtctggaactcctaacctcaagggatccacccgccttggcctcccaaagtgctgggattacaggtgtgagccgccatacccagcctgtttgttttttctaacagccatcctatgaagccatcctatgaagtatgaagtggtatctcactgtggttttgatttgcatttctctaatgatatatacatctcttcctgtgcttattgattatttgtatattttttctttggataaatgtcaattcaagttctgtgcacattattttttttctttagagacaggattcatgcacagtggctcatgcatgtaatcccagcactttgggaggcagaggcaggaggattgcaggagtccaggagtttgagaccagcctaggcaacatagtaagagctcatctctacaaaaataaatcaaaattggccgggcgcggtggctcacgcctgtcatcccagcactttgggaggccaaggcgggcggatcacctgaggtcaggagttcaagaccagcctcaacatggagaaactctgtctctactaaaaatacaaaattagccaggcatggtggtgcatgcctgtaatcccagctacttgggaggctgaggcaggagaattgcttgaatctgggaggcagaggttgcggtgagccgagatcgcaccattgcgctccagcctgagcaacaagagtgacactctgtctcaaaaaataaaaataaaaaaaataaataaatcaaaatttagccaggcatggtggtgctcaggtagtcccggctactcaggaggctgaggtgggaggattgcttaagccctggaggttgaggctgcagtgagccatgatcacgccactgcactctagcctgggtgacagaataagactgtctcaaaaaaaataaaataaaacaatagagagaaggtcttgctctggagatcttcctacctttgtctcccaaagtgctgggattacaggcttgagccttggtacccataccaaacatatatttgtataattagggtagaaaaattatcattaaacttattattgttggccaggtgtggtagctcacacctgtaatcccagcactttgggaggctgaagaaggtggatcacctgaggtcaggagttcaagaccagcctggccaacacggtaaaactccgtctctactaaaaatacaacaactttgatggcagaagggaaaaaaaaaagtatagtaccagccgggcgcagtggctcacacctgtaatcctagcactctgggagtccaacgcgggcagataatttgaggtcaggagttcaagaccagcctggccaacatgatgaaaccccgtctctactaaaaatacaaaaattagccaggcgtggtggcaggcccctgtaatcccagctactcgggagactgaggcaggagaatcgcttgaactcgggaggcagaggttgcaataagccgaagagcacggcattgcactccaacctgggcaacggagcgagactccaactcaaaaaataataaaaaataaataaataaataaataaaaaataggccggacacggtggctcaagcctgtaatcccagcactttgaaaggctgaggcaggcagatcacctgaggtcaggagttcaagaccagcctggccagtgtggtgaaaccccatctctacccaaaatacaaaaattagctgggtgtggtagcacacgcctgcaatcccagctactcgggaggctgaggcaggagaatcgcttgaacccacaaggcagaggttgcagtaagctgagattgtgccaccgcactccagcctgggcaacaagagcgaaactccatctaaaacaataaaaaataaataaaataaaataaataaaaaataaaaatacaaaaattagctgggtgtggcagtggcaggcacccgtaatccaagctactcgggagtctgaggcagaagaatcgcttaaacccaggaggcggaggttgcagtgagccgagatcacaccactgcactccagcctgggcgacagagcgagactccatctcaaaaatatatatatatagacacacaaaaaattagccaggcgtggtggcgggtgcctgtgatcccagctactcaggaggctgaggcaggagaatcgcttgaatacaggaggtagagattgcggtgagccaagatcatatcactgcattccaacctgggcgacagagtggaactctacctcaaaaaaaaaaaaaagattattgttattgcaattaaaggtagactcccagcaaacttttttgttgttgagacagtctcgctctgttgtgcaggctggagtgcaatgatgcgatctcagctcactgcaacctatacctctcgaattcaagggattctcctgcatcagccttccaagtagttcggattacagatgcgtgccaccacacctagctaatttttttttcttttttgagatggagtcttgctctgtcgcccaggctagagtgcagtcatgcgatatcagctcactgcaatctccgcctcccaggttcaagcaattctcctgcctaagcctcccgagtagctgggattacaggcacatgccaccgcgcctggctaatttttgtatttttagtagagtcagggtttcaacatcttggccaggctggtctcgaactcctgacctcgtgatccacccgcctcagcctcccaaagtattgggattacaggcgtgagccaccgctcccggccaattaatttttatatttttagtagagacggggtttcaccatgttggscaggcatggtcttgaactcctggcctcaggtgatctgcccacccctgcttcccaaagtgctaggattacaggtgtgagccaccatgcctagccaaactttttttcttattatgattattagagatgaggtcttgctatgttgctcgggctggtctctaacacttgggctcaagtttgagtttgaaaccagcctaggcaagaaaggagatgactgtctcaaaataaagcaaattttaaaaaataaaaaataagctgtttccaatcacaagcatttgcagagtgggagaggaaactgctgatttcactttagttaaatcaacatctattgagggtctcctatgtaccaaatcctaaaatactatgcaaagtttctggtctaggacacaggcaacaagcaacacagtaccgggtggatggtctctgctaggggaacccgggatgccacaccaaggaaccagaggaggatgcctcaccccctgggcaagtctgggacagttttaggactaaaagaataacagtaatgaattataacctaatcaacaaaataaggatccattgagttgggccaggcgcgatggctcacgcctgtaatcccagcactttgggaggctaagccaggtggaacacttgaggtcaggagttcgagaccagcctgcccaacatggtgaaactccgtctctatgagaaaaaaaaaaaattagctgggagtggtggcacatgcctgtaatcccagctacttgggaggctgaagcaggagaatcacttaaacctgggaggtggaggttgcagtgagccgagattgccccctgccctccagcctggcgaaagagcgagactccgtctcaaaaaaaaaaaaaaaatccattgagtctattcttattttttactttttgacacagagtctcattctgttgcccaggatggagtgcagtagcatgatcacagcccactgcagccttgatgaccagctaatttctaaattttttgtcaagacggtgtcttgtcatgttgcccaggctggtccaaaactcatgtgcttaagccatcctcccaactcagccttccaaaacgctgatattacaggagtgacccaccgtgcctgtcgagtacattctaacaaatacgagaggagaaaaagctcttctttacaatagaatgctgactaaataaatggagaaggaatgatagatttagaaaaattatcattttataaccatcatactaatgattgattcagtcaagaatcataaatgaatgttattgagtccaagtttaataaggaacaggattttagataatttcagaatatctccccacaaattacttactaattacaaaagggaagaaagataactttacagtagagaaatctgatagataccactaaatgaagtgattgaagttaaacatcacgaataacgagacaaactgacaccatctgcttcttgatgccatgcactaagaaagaaacatcacttctttggcccaaaagctccctcagctggtaaacaacttcagcaaactttcagcatacaaaatcaatttacaaaaatcactaggccgggcgcggtggctcacgcctgtaatcccagcactttggtaggccgaggcaggcagatcacgaggtcaggagatcaagaccatcctggctaacgcggtgaaaccccgtctctactaaaaatacaaaaaattagctgggcgtggtggcgggcgcctgtggtcccagctactcgggaggctgaggcaggagaatggcgtgaacccgggaggtggagcttgcagtgagccgagatcgcaccactgcactccagcctgggcgacatagcaagatccgtctcaaaaaaaaataaaataaaataaaatacaaaataaaataaaaattgccaatgaacattattgactagcattcaaataatctaacattgagctttcctgacaaagacaccaaaagcaattgcaacaaaggcaaaatttgacaaatgggatctaattcaatttaagagcttctgcacagcaaaataaactatcaacagaataaacagtcaacctaaagaatgggagaaaatacacatctgacacaggtctgatatccagaatctacaaggaccttaaacaaattcacaatgaaaaaaacaagcccattaaaaagtggacaaaggatgaaacacttttcttttctttctttctttttttttcttagatgagggtctcactctgtcacccaggctggagtgcagtggtgtaatctcagcttagtgcagcctccgcctcccaggctcaagtaatcctcccacctgagcctcccgagtagctgggacaacaggtacacgccaccatgcccagctaatttttgtagcttttgcagagatggggttttgccatgttgctcaggttggtcttgaattcctgagctcaagtgatccacccgcctgagcctcccaaagttctgggattacaggcacgagccactgtgaccagccaacagatgcttttcaaaagaagatatacacgtacatgagaaaatgctcatcaccaccaatcattagagaaatgcagatcaaaaccacaatgagataccatctcacaccagtcagaatggcttttttttttttttttgagatggtctctctctgttgcccaggctagagtgcagtggcacgatcttggctcactgcaacctatgcctccggggttcaagagattctcctgcctcagcctcctgattagctgggattacagacgcgcatcaccatgcccagctaatttttgtacttttagtaaagacggggtttcaccatgttggccatgctggtctcgaactcccgacctcaggtgatccacccgcctcggcctcccaaagtgttgggattacaggcgtgagccactgcgcccagccagaatggctattattcaaagtcagaaaataacacatgctggcaaagttgtggacaaaaggaaagccttatacaccgctggtgggaatgtaaattacttcagccattgtggaatgcagtttggtgattaccattcaacccagtaatcccattttcgggtgtatacccaaaggaatataaatcattctaccataaagacatatgcatggccaggcgcggtggctcacgcctgtaatcccagcactttggaaggccaaggcaggaggaccacttgaggtcaggagttcgataccagcctggccaacatggtgaaacttcgtctctactaaaaatacaaaaattagctgggcatcattggggccgcctgtaatcccagctactagggaggtggaggcaagagaatcgcttgaacctgggagctgaggtcacgccattgtactccagcctgggcaacaagagcaaaggaagggaagggaaggggaggggaggggaagggaggagagggaagagaagggaggagggaagggaggagggagggagggagggaaggaagaaggaaggaaggaaggaaggaaggaaggaaggaaggaaggaaggaaagaaagaaagaaaggaagaaaaagaaagaaagaaagagagaaggggtacatatacagcacggtacatatacatcatggaatactatgcagccataaaaaagaatgagatcatgtcttctgtgggaaccgggatgaagctggaggccattatccttagcaaactaatgcaagaacagaaaaccaaatgccacatgttctcacttgtaagtggaagctaaaagataagaactcatgaactcaaagaggggaaccacacagacactggggcctacttgagggtggaggatgggaagagggagaggagcagaaaaaaataactcttgcgtactaggtttagtacctaggtgatgaaataatctgtacaacaaacccccgtgacatgagtcatatgtagcaaacctgcacatgtacacttgaacctaaaagttaaaaaaagaagaaacatcacttctgtagtattcttgccaaaaatgcatactctaattaagaggaaacattagccaaatccaaactgagggccattctacaaaacaaatggccagtgctcttcaaaaatgtcaatgttatgaaagattataaagacagagagcccgggtgcggtggctcatgcctgtaatcacagcacgttgagaggctgaggcagttggatcacttgaggtcaggagtttgagacccagcctgggcaacatggcaaaccctgactctaccaaaaattagctgggcatggtgtcgcacaactgtggtcctagctacccgggaggctgaggtgggaggattgctggagtctaggaagttgaggctgcagtgagccgattgcaccactacactccagcctgggtgacaaagtgaaaccctgtctcaaaaaaacaaaaaagtaaagatggcttgtctgatggtagtgggttatcagaacttattattaataacattagtgtcactaaagttggtatacaaccccctattgctaaatttggctttaaaaaaaaagagaaagaaattgttccagattaatggagagtaaacagacatggatattaaatgtattgcatagtgctaaaagggataacggccagaaaaaaaaatttacataaatgacattgttgggacaattggtaaaatctgaataagaactgcatattaaatataacattgaatcaatcttaaattttctgatttctgattttctggatacataaaacaatatccttgtttttaggaaatacagaaatatttttgggtaaagggacacgatgtctgcaaattactctcaaattgttaagcaaaacataatgtatttgtagtatatatggaaataaaaatataaatgtgataaaatgataataattggtgtaattggtcaatctgggtgaaaaagtatacaggaattttttgtagcattcttgggatttttctgcaaatctgaaattattaaaaacaaaatttttattttaattttattgtcccccaggctggagtgcagtggcaccatctcggctcactgcaacctccacctcccgggtttaagcgattctcctgcctcagcctccctagtagctgggattacaggcgtgagccaccacgcactgctaatttttttgtatttttagtagaaacggggtctcaccatcggtcaggctggtctcaaacttctgacctcaggtgatccgtccacctcggcctcccagagtgttgggattacatgcgtgaaccaccgcatgcggccaaaagacaaaaaaaaatttttttaatcaaatcaccatccaatgtaattccatctccaccatctactacagatgtgatcgtggataaaccataaacctttcataacttctagaaagtaactactaatactattatggtagaaaggatcaatgttaaagcaaaactataaaaataaataaatacgatcacttgaccatggcgccttttcaatgaaataaggggcaaggggcttgggcaaacgaggatgcgtaagatgatctggggtcccttccggatccccaggtcctcgacccccggcatgtaagggtagagtcaaggagggtcttcttaagcgttcctcggcgcggtcctgaagagattaaaggcgtcaaatggaccgctccacacctgagctgccgccaagctaactcaatccgagccggcgcatttgagaaggcgcctgtgagggtcgctcctcagccgccgcgctcccactccgcgtccccactccgcgccgccgcgcctctgccagccccgaaggtggacgtgaagctccaacacctcgacttctgggcccgcctccatggccaggtcccgggactgctggactgggacatggggaacgagctctttctggccttcaccacatctcacctccccttagcggagcagaaacgtgagtagcgggtggggtgaggtggggggctgggcgtggcggagggtggcctaggggctcgcgggaccccggggcagacggctccccagccttcgcccccacctcccggggaggcttggggggccgagcgccccgcgccccccccccccgacggcttagctccgccgcccccgctccacccccactcgcgaactctactcgggagtggtttggggggtgggggggttcgcgcctgactcaattggaagctcccggaggacagctggtctcacctaaaaacggaggctttccactctacgtcacccgccaggctcccagaacattccaaggcctcttctgggtcttctccttggcgctggtcgccatttgctatactgtatatttcagttacttttccgtctcttaaaaaaacaggcctcatcgttttatccatggctgtattctcacctcttaacatattgcctgacacctasaagtgytccgtamttgccaaatgcttagttgaccatcgcgatcttttaggttttctttttcttctttggacgtcaagtgtggagagttgacataattactccccacattcatggtaccttttcgcctgcaagacccttggattaactcttttttttttttccaaattttttttttgagacggagtcttgctctgtcgccccaggctggagtgcagtggcgcgatcctcggctcactgcaacctccgcctcccgggttcaaacgattctcccgccccagcctcctgagtagcctggattgcaggggtgcgccaccacgccctgttaattttttttatttttagtagaggcagagtttcaccatgttgtccatgtcggcctcccaaaagtgctgggattacaggcctgagccaccgcccccggccttaactcttccttttgccccttaagtctccacccctccttccattacctctgctgctcccattaccaaccctaatccatttaacgtctgttttctccactcattgtttttgagagctgttgttttaggttgctaaattcagacctgattcattatttctgattgttgttagtattctatcggctgggtgtcccaccttttacattttaattttctttaccctagattgcttccaactctttgccaccataattaatgctaatgaacattctttcttgtttcttcattcaagaaatatgtattgagcacctccaactgacctggcactgttttagacactcatgatacacagtgaatagaacagacaaggaaccttacattctactgggggcagacagataatccacagaagtataataaatgggtagatcatatagtatgctataaagtgataatctgcaatggggaaagaacaggagaaggagactcaggaataggggaagggtgtggtggcagctacagtttgttttttttgtttttgttgttttttgagatggagtctggctctgttgcccacgctgcagtggtgcgatctcctctgccccccgggttcaagtgattctcctgcctcagcctcccgagtagctgggactacaggcacgcgctaccatgcccagctaatttttgtatttttagtaaagacggggattccctgtgttggccaggctagtcttcaattcctgaccatgatccgccgtctcagcctcccaaagtgctagaattacaggtgtgagccaccgcacccggccttcttttttttttttttgtcatggagtctcactctgtcgcccaggctggagtacagtagcgcaatctcagttcactgcaccctctgccacccaggttcaagcgattcttgtgcttcagcctcaccagtagctgggattacaggcatgcatcaccacacccagctaatttttatatttttagtagagacagggtttcaccatgttggccagccaggctggtctcaaactcctggcctcaagtgatccgcttccctcagcctcctaaagtgctgggattacaggtgtgagccaccgcgccaggccacagctacagttttaaataagattgtggggttgaactcaattaggaacataatatttgagcaaatagttgataggaggggtggagtgagcccagaggatacttgaagggaaagtggtaaggtcagtaaggctggatgacagtaaataaagagctccaaagggtgtggttgagagcaggaatgcctgtcctctaaggactttagggttgactttgagtcagatgaggattgattgtaaggttttgtttgagatggactcttgctcttgctcaggctagagtgcagtggcacaattacctccaggctcaagcaatgctcccacctcagtccccaaagtagctgcaaccacaggcacaggccaccacactggctaacttttttactatttgtagagatggggatctccctatgttgcccaggctggtcttgaactcctggactcgagcaatcctcctacctcccaaattgagcagaggagtgacatgctctcagggtctgcttcatgagtgtgtgacccgtgcagttgcctaggtgcctgtgtttggtttaatacactgctgtcactgtcttgaaatttttaataatttttcaacgaggagcctcatgttttctttactggaccctacaaattatgtggctagtcctgcatgatctagatttgaaaagatcactctggctgttgtgttgagagtagactgtggatgtacagagtctaggaggctgcagtagtaatccagacaagagatgatggtagattgggccagggtagtagcagggagaaccagctggctatgctgatggattggatatggcgtataagacagacaattgagtatgagccttcaaagtgttttgacctagtggaaggatagagttgccttgtactgagtgggagacaggtttaggaaggaagatcaggaattctgttctggatatgctgagctggagatccttagacatccaagtagaagcattgagtctgcagttggatacatgagcctggagttctggagagaagtggggactgcagatgtaaattttgggtcttttggtatatgggtggaacttaaggagtaagaatagaggaggaacaagaatgagccctgggggcagtccattgtaaagagattggagagaagagagataactagcaaaaaagactattgagaatcaaaactagggcgtctgtggtatcctggaaaccaagtggaaaaagcctttcaaggagggaggggttggatgagtggaatgtaagtgatgattggacttaacaaagcagaggtccctggttagtggttttagtaagtggtagaacaaaaaacctgactgaagggggtttaagagtagaaggaggggaagtagaggcaatgtgttatgcctcaacaggaaataagatgggataatctttttctttttctttcttcttttttttttttttagagacagggtctctatctggtgcccaggctggactgcagtggcaccagcacagctcactgcagtcttgagcagccttgagcagccttgagcagccttgaactcctcggctcaagtgatcctcctgcctcagctttccaaagcaggctgagattacaagcatgagccactgcacctggtccctaaaatgggagaattaacagcatgtttgcatgctgatgagaatgacccaacaaagacaaaaaattagtgacacaggaaagagaggggaagatttgtggaacaacatccttgaaaaagcatgggggatctgtgccaaagagagacacagacatacaaaggtgctatccttgggtcgcaatgagatcaccagtccattgatcctatcaccttttcactgtttcaatcacttgatatgtccacccttatttaactaacttgaatcccatggtcagatattacgcaggttccctggatcatctgtggctttggagcactttgttggccaaaccacaaccctgactaaatccacctctgccaaacgagtgcgccaaaaccataattcagtggactggtgacctcagtgggatcatagttggggttgagggagttagccagaaagacacgaggtggtgcgtttttatgtggtgcataaatgaggttacggagaggttgcagttgttggtttaggttatgcctgagggagtgtccacagtagagtagaagtcaaactcgctggagaagagttcaataaatagcaaagatcatgtttttgtttttgaagcaaggtctggctttgttgcccaagctggagtgcaatagcgtaagcttggctcactgcaacctcccttttcccgctcaagccatcctcccacttcagcctcctgagtagctgggactacaggctcacgccaccacactcggctagattattatctttgtattttttatagagatggggtttcaccatgttgcccaggctgatttcaaactcctgggcccaagcaatccgcctgcctaagcctcttaaagtgctgggattacaggcatgagccgctgcacctggccagcagccaagatttaaggcaggagtagtgttggagagtgacagctaaaccaggaggtcagtagatggtagtaacaatggagattgattagtatataagttcctgtattaacttgaatatatacatccaggagcagacagtaaggtcgagtaaattgtggtcctgcctgattgctcttaacaagggctgctccagttgatacacagaactgcagtaaaataagagattctgtctctttgcatgtttctcaacacttggtattatctttataattccagtcaatttgattatctcattatcttacagtgtttttcgtattattaataatgctgatcatctcgttagccattcagttatcccctccttgtgaatgctgattcatatcatttgtccatttctaagtttgtgttgaccttttacatattgatttgtaggagctctctatgtatcagagaactgagaaatttggattgaagttttgctattttgtttgtttgtctatttgttttttgcttatggtgatttttactatgttagaacttttttttgagacagagtcttgctgtgtcacctaggctggagtgtagtggcacgatctcagctcactgcaacttctgcctcccaggttcaagtgattctcctgcctcagcctcccaagtagctgggactacaggtacacaccaccaagcccggctaattttttgtacttttagtagagatggggtttcaccttgttggccaggctggtctcaaactcctgacctcaagtgatccacctgcctcggcctcccaaagtgctgggattacaggtgtgggccaccgcacctggccaaactttaatttttgtgctataatatgtgcataaaacttacagattcattttgagggtaactggcatcttaatagtatgtattataagtctttgttcaagtattttaagttctttatttaagagctgagatgggaagattgcttgagttgggaggtggagattgcagtgagccggtgtcacaccactgcactccagcatgggcaaccaagcaagaccctgtctccaaaaaaaccccaatttttctatcttttgctactttttccttttttgaatactatgttgaatattagcaacataataggcatcctctctaattactgagctctccgataagtatatcatttctcaaacaaaagcctagattcatctgtaatataatgacactcatagggacagtgagggggcaaaaatagtttttgtcctgaacaaccattaatggtggtgccacttgctaagacaaagaatacaggaaggccaggcatggtagctcacgcccgtaatcccaacactttgggagcccgaagcaggaggattgcttgaacccaggggttcgagaccagcccaggcaacatagaccctcatctatacaaaaaatacaaaaattgggctgggcgcggtggctcaagcctgtaatcccagcactttgggagggtgaggcaggcagatcatgagtcaggagttcgacaccagcctggccaatatggtgaaaccacgtctctactaaaaaatacaaaaattagccgggtgtggtggcgtgcgcttgtagtcccagcttcttgggaggctgaggcaggagaatcacttgaacctgggaggcagaggttgcagtgagccaagatcgcgccactacactccagcctgggcgacagagcgagactccatctgaaaaaaaaaaaatacaaaaattagtggggtgcagtggcatgtacctgtagttccagctacctgggagactgaggtgggagaatctcttgagcacaccactgcactccagcctgtgcaacagagcaagaccctgtctcaaaaaaaatacaagaatacaggaggaagagcaagaagatggaattcagttttagaagtgcgtttgaagtgcctgtgggctacccaagtaaagacatccagtaggtagttctccttaagggctagcacagaatgctaggctagaggtgaagatttgagagctctacatttttttatagatgttaactgaagccacggacatgcatgagatcattcagggatagtatacgtagagtgagaagaaaagaatgcagaggggaatgagaaggtcagagaggtaaagggaaaacccgtagaagtagaatgtgatgttaactcccaaggcagggcccacaaccttctcccagagaagccttaaggcctaggatcctagggtcacaaagggatattctaggatgttttgactctctctgtctttctttttgccagttgccaggtataaactccgaattgttaagccaccaaaattacccctagagaaaaaacccaaccctgataaggatggtacgtattgagttctctgacctgtttctgtggcctgggctggagaccaggggcacccaaagccagtgggctgtggcacacaatcttttgttctgcacaggtccagattatgagcccaacctctggatgtgggtaaatcccaacattgtgtatccccctggaaagctggaggtctcaggacgtaggaagagggaggacctgacaagcacactcccctcctctcagccaccccagaaggaggaagatgccagctgctcagaggccgcaggggtggaatcactgtcccagtcctccagcaagcggtctccccctcggaagcggtttgccttttcccccagcacctgggaggtatgcatttttggggatgggagtgggacttgggcagtaggcgaggggcatggggaagagccattacagttctgctctcttagccatagcaaaaggtgaatgggttcagaaattacctacatgcttgggttggggagaagcccaaatggtggccttagaccacccccccttcctgccactgcaccctggagtagaggctgaggagtcaggaccagttcctactctgtgctcctctagctcacagaagaggaggaggctgaggaccaggaagacagctcctctatggctctcccatcccctcacaaaagggcccccctccagagtcggaggcttcggcaagccagcagccaggcggggaggctctggtcccggccccctctcaattacttccacctaattgccctggcattaagaaacagttccccctgtggcctcaacgtgcaacagatctacagtttcactcggtatgtgccgggggccctgcgaggagggggaagtgggggccagggccccgggctgatgccttccaatccatcccaggccctgggttgctgacctggtttccctatctgggtctgagaggacaagtatgttcccagttcccttttcccaggtgcatttgtgcccacattgtgcccacattttatggctttagttttttttttctttttaacaagttttcagtgttctttgggtatagttctcctttaaaacatacattcacttgggtcaggtaacagtttccccaccatcctctgaagatcagccagtctaaagtcaggtttccccaacggttcccacctgcttctgctaggactggactgcctggcacagctccctgcacccccaggggtgcagagaacccagttgagaaggattttccatttagctcagatagtcctgctcacaggagggtgaggaagggagtttcttgggccctttcccagtgttaggagaagtgcctaatgtctcaggacaggaattttcaagtggtgtccgtcctcaaccaagattcctcttacaggagctgcttggcctgattctgctttgttcatgctgtggtccaagccctgggccctcagagggagggagggttcaggtgagccacgcaccacgtggatgctttgccacgtgctcagttagcaaagagcaactccaggccaacttgctactatccccctggagagaagggctaaagcccctggcccctgggtagaacatgccccagagaagggcattccccagacataacatgcctttccttacctctcctccctgtccatagaaagcacttcccctttttccggacggccccggaaggctggaagaatactgtccgtcacaatctctgttttcgagacagctttgagaaagtgcctgtcagcatgcagggcggggccagcacacggcctcgatcttgcctctggaagttgaccgaggagggacaccgccgctttgcggaggaggcccgcgccttggcttccactcggctagaaagtatccaacagtgcatgagccagccaggtgtgaagacttgttgtgcgtgggcccaaggggaagagacctgaggatcctgacccaaggccaagtgtggaagcctgggtcacaccgtgggggtgggggaatgcatcttctataggaaacagggagattaacagtgatctgagaccctcaggtgatgcctgcctgaggtgagacctcccccaccagtgtggggcgtgatgtgccaggaatccatgggcaaacaactaaggggcaactggccttaccaagaccagcagtctaggcaatagtgagcacacaacatgagaagcacagttaatagaggttatgtacaaagagtacttctactttccctggagcagtgcagggaggcttcagagaagaggcagcatttgagccttgagtgaaagaagcagatgacctgctatgagagagcatcccaggcctaggaaacagcaattgtgaagtataaactcctgaactctctccttttcttacagatgtgatgcccttcctctttgatctttaaccccaagaagcaacagccagctaatgctttattaaaattaccctcactagccttctgtgtgtgtctgtggaggtggggtctctaaggatggggttaagggtggaggtggagatcaactccaaggttggagatggaatgccttcagcttacagatgctcctgaggcaatggggcaggtgcctgccgtgcagcaaagggagtccgtaattttctttcctcaaaggaggaaaatgcacagccttctaaagcatcttggagcaatttccatttttctggattatgaagataatcttggctggatgcagtggctcacacctgtaatccagcactttgggaggctgaggcaggaggatcccttgagcacaggaggtcaaggctgcagtcggccatgatcacaccactgcactttagcctgggcaacagcaagactccatctgtaaaaattattctgggagatgcccgtttgtagcagccaattctgtaagcaccacacattcattcaattgatactccttaagtggctactgtgtaccaagctcaggatagaatacaggtgccagggagaactgcgctgcattctcttagctgcaatagcgttgagggcatttgctaagggagcatagaaaggtgctttggggaggcgccatgttttgttttgttttgttttgtttttaaagcttacagatgacttttttgtgtgtgtgtgacagtttcactcttgctgcccaggctggaatgcaatggtgcaatctcggcctaccgcaaccttcacctcctgggtttaagcgattctcctgcctcagcctcccaagtggctgggattacaggcatgcaccacaaagcccagctaattttgtgtattttttagtagagacggggtttctccatgttggtcaggctgatctcgaattttcgacctcaggtgatccacctgccttggcctcccaaagtgctgggattacaggtgtgagccaccacacccagcaggtgactttttttttttgagacggagtctcaccctgttgcccaggctggagtgcagtggcacaatcttggctcactgcaacctccgcctcccaggttcaagcgatcttcctgcctcagcttccctagtagctgggattacaggcatgcaccaccaggcccagttaatttttgtatttttagtagagacagggttttgccatcttggccaggctggtttccaactcctgacttcaggtgatccacccgccttggcctcccaaagtgctgggattacaggcgtaagccaccacacctggcctcttgagttaatttctgtatggtcaaggttcatttctggcttgtagatgtccaattgctcagcctcccaaagtgctggattaaaggtgtgagctgactatagcctcgaactccttgggctcgggcaattctcccacctcagcctcccaaggagctgggactacaggtgcgtaccaccacaccaggctaattttttttttttttttttttttttgagacggagttttgctcttgttgcccaggctggaatgcaatggcacgatctctgctcactgcaacctctacctcctgggttcaagccattctcctgctgcagcctcccaggtagctgggattacaggcatgcaccaccacacccagctaattttgtatttttagtagagatggggtttctccatgttggtcaagctggtctcaaacttccgacctcaggtgatccacgtgcctctatctcccaaagtgctggcattacaggtgtgagccatctcacccggccacacccggctaattttttaaattttttgtagagatggagtctcactctttcccaggttggtcttgaactgctgggctcaagcaatccacctggtttggtttgattttttttttttttttgagatgggagtcgtgctctgttgcccaggctggagtgcagtggcacgatctcggctcactgcaacctccgcctaccgggttcaagcgattctcctgtctcagcctagcaagtagctcggattacaggcacatggccaccaggccccactaatttttctatttttagtagatacggggtttcaccatgttggccaggttggtctcgatcgccctgacgttgtgatccgcctgcctcagcctcccaaagtgctgggattacaggcactagccaactgatattttgttgactgaagatttcaaacacatacaaagtcggtctaatgaaccctacatatctgtcatccagcttcatctccccacaggcaatgttattaacacattcattcccctttcctggaattattgtgtgtgtgtgtgtgtgtgtgtgtgtgtgtgtgtgtgtgtgtgtgtgtgtgtgtttgagacggagtctcactctgtcacccagactggaatgcagtggcactatctcggctcactgcaacctccgcctcccgggttcaagcaattctcctgcctcagcctaccatgtagttggaattacaggtgagcgccaccacgcccagctaatttctgtatttttaatagagggtttcaccatgttgcccaagctggtcttgaactcctgacctcaagtgatccacctgccttggcctccctggattattttgaatcaatttctagacatcatttcttttctctaaaaagactgaacatgatacaatcatcacatccaggccgggcgcagtggctcaagcctgtaatcccagcactttgggaggccgaggtgggcggatcacaaggtcaggagatcgagaccatcctggctaacacggtaaaaccctgtctctactaaaaatatagaaaattagctgggcgtggtggcgggcgcctgtagtcccagctgcttgggaggctgaggcaggagaatggcatgaacctgagaggcggagcttacagtgagctgagatcgtgccactgcactccagcctgggcgacagagcaagactccgtctcaaaaaaaaaaaaaatcacatccaaaatttttaaaaatgtattaggaatcatattcctaattttctaactttttaaaatttttatttcttttagagatgaggtctccctatgttgccaaggctggtcttaaactcctgggctcccaaagtgctgggatgacaggtgtaagccactgtgcctggccctaattttctattttcttagcttattagctgaaatacttctgtagaaaaatcttcctctctcaggccgggcacagtggttcatgcctgtcatcctggcactttgggatgccaaggcaggcggatcacctgaggtcatgagttggagaccagcctggtcaacgtggtgaaaccccgtctctactaaaaatacattagccaggcgtggggcacaagcctgtaatcccagctactcggggactgaggcaggaagatcacttgaacccaggaggtggaggttgcagtgagcagagatcacgccactgcactccagcctgagtgacagagggagacttcgtctcaaaagaaaaatagggcctgagtttcattacccttcgccatgctgtttgtctccagcacaccctcaggaaaagctacttgtggaataagagtccttgaggctgcaggtcccagctggggggctgtggcctccctggttgcaggggacagcctcagggcagggacagctggcagccttagatctgtggggaatagggagaagcctgaggacaaggaaggaatgagtgaggttcagggctgtttagggatcccacagacactcagtgcttagagacgatgccagatctcactccctctccgctcttccctcctgcccaacaggcctgcacagaaacaaagctctgccttcaaggccaccactgcccacctgggctgggcataactcctgtcttgaagtggcagtgggtggtgcttcactcttgagagagtggctcccttgtccagagggctcccaggtctctgcaactgaccagggttgaggtagtctcactttttcatttttcctccctgctttccttgctggtaactccaatctgatgtagctcccgcctcctcatttaaatttttatttatttttcgttttgtctttgagatagggcccttcagtggcacaatcacagttcatgtgcagccttgaactcctggactcaagcaatcctccacctcctgggttcaagcagttctcctgcctcagcctcccgagtagctgggattacagacgcccgccaccacatcggctaattttttgtatttttagtagagatggggtttcaccgtattgttcaggctggtctcaaactcctgacctcaggtgatccacctgcctcggcctcctaaagcgctgggattgcaggcgtggccaccgcacccagcctggatgctgatttctaagtgatagccactgcaggagtgggtgagggggaccaggtcaggtcatttgctctgggcccacccagagctatccggcagccagagcctctttcctgccacccgagtctattcagctcccaggaaggaggggtcctgagtcccaagctctgctttcatctgatttggcctcaatttgtccccatcatctgcacttcgtatacagccttatcgctgtgcacattcttgttaacatcagggatttttttgctttgtttttgttttttgagatggagtctcaccctgttgcccaggctggagtgcaatggagcaatctcatcccattgcaacttccgcctcccaggttcaagcgattctcctgcctcagcctcccaagcagctgggactgcaggcgtgcaccaccgtatctggctaatttttgtattttactaaagacgaagtttcatcatgtggcccaggctggtctcaaactcctgagctctggcaatccactcgcctcggcctccaacagtactagattacaggtgtgagccaccacacctggccaacatcaggtttaagttgcaagtggatcccaaaatgcagcagatcagaaagaaagtacaaaacaatacagcgtttactaagaaaaaatctgcctttgcccactttgctctcaactcctatacttgcacctagttttcacttatcaattattttgttatttttctttttttaggcaggatcgcaatcccggctcactgcaacctccacctcccaggttcaagcaattctgctgcctcagtctcctgagtagctgggaccacaggcatgtgccatcacgtcctgctaatttttgtatttttagtagagatggggtttcaccatgttgcccaggctggtcttgtaccctccctgaggtcaagtgatccacccacgtcagcctctcaaagtgttgggattacaggtgtgagccaccgtgcctagacttcaacaattatttgttacgcattttcactataccaggcccttgccaggtgttagggatacagcaaagaaacccaaatggttcctcacagttttcagtctagatgtaaagatactaaaccaatacactaattatgtgcaataatgcacaatggtaatattgagtaaagattgggttattggccaagcatggtggctcatgcctgtaatcccagcactttgggaggccaaagcaagatcgcctgaggtcaggagttcaagaccaagcctggccaacatggtgaaaccctgtctctacaaaaatacaaaaattagctggacatgatggtgggtgcttataatcccagctactcgggaggctgaggcgggagaatcacttgaacctgagaggcggaggttgcagtgagaagagatcatgccattacactccagcctgggcaacagagtgagactccttctcaaaaaaaaaaaaaaaaaaaaagatggagttattttgagagaaagcaatattggcatctaatttagattggaggggagatcagagaggacctttctaagaaagtgacattttaactgagacctgtagcatgaggagaagttagccaggctgaagaacagaaaggaaaagcattcctttactttttttttttttttttgagacagagtcttgtgccgtcacccaggctggagtgcaatggcacaatcttggcccactgcaacctctgcctcccgggttcaagcttctcctgcctcagcctcccgagtagctgggattacaggggcacaccaccacacccggctaactttttgtacctttagtagagacagggttttaccatgttggccaggctggtcttgaactcctgacctcgtgatctccctgccttggcttcccaaagtgttgggattacaagcataagccaccgccccaggccggaggaaaagcattctaatagaggcattagaatggacaaagccctggaggtagagacataccttggccttttgagcaaacgggataagaccatggaagagagaatacactaaacaagggcagaaagatccaaggtaaaactgggagaggggcagggtaggctttcctaggctatgacagggcatttggatttttttccagtatggtggaaagtaattgaagtaacttacataactgtttgttgttgtcgttgttaatcacaattagccattcattgaaagtggcttgttgtggggagaagccaacatggaagcaggaacacccattaggaggtgactgcggtaaatcaggccggttggaggagtagtggcagtagagatggagacagggagaagaacaatttgatgatgcatcgtggaggtcgaaaaaacaagtcaatagtagtgactgcaggagaagaaaaggcaagaatggccgggcgtggtggctcacgcctgtaatcctagcactttgggaggctgaggcagccggatcacgaggtcaggagatcgagaccatcctggctaacacagtgaaaccccatctctactaaaaatacaaaaaattagccggtgtggtggcagacgcctgtattcccagctactctggaggctgaggcaggagaatggcatgaacctgggaggtggagcctgcagtgagcccagatcgcgccactgcactccagcctgggtgacagagcgggactctgtctcaaaaaaaaaaaaaaagaaggaaaaggcaagaatgactctgaggtttttggtttgagcaagtaggtgaatggtgaggagaggaagcctgcaggagtagcaggtttgagcgttctgtgtttagtatctgtgagacaagtccgggcacgatggctcacacctgtaatcccagtacttggggaggcagaggtgggtggatcacttgagcccaggagttggaaaccagcctgggcaacctggtgagacctcctctctacaaaaaataaataagctgggcgtggtggcgtgtgcctgtggtcccagctacttgggaggctgaggtgggaggattgcttgagcccagggggatcaagcctgcagtgagtcataattgtgccactgcactccagcctgagtagtgacagagcaagatcctgtctccaattaaaaaaaaaaaaaaaggaatctgtgaggccaggggcggtggctcacacctataatcccagcactttgggaggctgaggtgggaggatcactgagttcaggagtttgagaccagcctggccaacatggtgaaaccccgtctctactaaaaatgcaaaaattagccaggtacggtggctcacgcttgtaatcccagcactttgggaggctgaggcaggcggatcatgaggtcaggagtttgagaccagactggccaacagggtgaaaccctgtctctactaaaaatacaaaaattagctgggcgtggtggcgggcgcctgtaatcccagatacttgggaggctgaggcaggagaatcgtttgaacccaggaggcagaggttgcagtgagccgagatcgcgccactgcactccagcctgggtgacagagctagacactgtctcaaaaaaagaaaaagaaaaaaaaaaatagccagacgtggtggcacgcgcctgtaatcccagctacacaggagactgagacaagagaattgcgtgaacccaggaggcagaagttgccctgagctgagatcacacagctgcactccagcctgggtgacagagcaagactccatctcaaaaaaaaaagcgggggggtggggccgggcacagtggctcacgcctgtaatcctagcactttgggaggccgaggtgggtggatcacctgaggtggggagttcgagaccagcctgatcaacacggagaaaccccgtctctactaaaaaaaaaaaaaaaaatacaaaattagctgggtgtggtggcacatgcctgtaatcccagctacttgggaggctgaggcaggagaattgcttgagcttgaacccaggaggcggaggttgtggtgagctgagctcacgccattgcactccagcctaggcaacaagagcaaaactccatctcaaaaaaaaaaaaaaaaggaatctgtgagacatcagggtggttatgtcaatgtcaagtagatatttataagtctagagttcagaagagaagtctgagctgaaaatgtaaatacactgagagtcatcagtatatagatagcacttaatatcaagttctatgtactgacatagaaagatatccacaaggccaggcacggtgactcacgcctgcaatcccagcactttgggaggccgaggcgggtggatcacttgagttcgagagttcgagacccgcctgaccaacatggagaaaccctgcttctattaaaaatacaaaattagccaggcgtggtggtgcatagctgtaatcccagctactcgggaggctgaggcaggagaatcgctcaaacccgggaggcggaggttgttgtgagctgagatggcaccattgcactccagcctgggcaacaagagtgaaactccatctcaaaaggaaaaaaaaagataaccaaaatacaatttgaggaattaaaaaagagtaggagaacagtgtgttcaaaattactccaaatatggcagaaattatgttcacatatatatgaagtctaaacagagaaaacatcttgatcaatataggtgtcaaagagcaatggccatctttgaggactgggtaggcaacataaatggggcaattgtttgtagcctctgtacagtttttgttttttacaagaaattgctttttacaatttttctttttttttttttcttttttttttttgagactgagtcttgctggaatgcagtggtaagatctcagctcactgcaacctctgcctcctgggctcaagtaatcgtcctatctcagcctccctggtagctgggaccacagacacacacaatcctgcctggctaattttttatatttttagtagagaagaggttttgccatgttgcccaggctggtctcaaactcctgagctcaagcaatctgcccgttgggattacaggcatgagctaccgtgtccagcctatagtttttgtttgtctgtttgttttttgagacagtctagctctgtcacccaggcttgagtgcggtggcatgatctcagctcactgcaacctcagcctcctggtttcaagtgattctcgtgcctcaacctcctgagtagctgggactacaggtgagcaccaacacacctggctttttgtatttttagtagagaccaggtttcgctatgttggccacatgttggctaggctggtttcgaactcctgatctcaagtgattcacctaccttggcctcccaaagtgctgggattacaggcatgaactaccgcacctgggctacaatttttgttgttgttgttgttgttttgggtttttttgttttgtgtttgtttttttttttttgttcttttagtatttattgatcattcttgggtgtttctcggagagggggatttggcagggtcataggacaatagtggagggaaggtcagcagataaacatgtgaacaagcatctctggttttcctaggcagaggaccctgcggccttccaccgtgtttgtgtccctgggtacttgaaattagggagtggtgatgactcttaatgaccatgctgccttcaagcatctgtttaacaaagcacatcttgcaccgcccttaatccatttaaccctgagtggatacagcacatgtttcagagagcacggggttgggggtaaggttatagattaacagcatcccaaggcagaagaatttttcttagtacagaacaaaatggagtctcccatgtctacttctttctacacagacacagtaacaatctgatctctctcttttccccacatttcccccttttctattcaacaaaaccgccatcatcatcatggcccgttcccaatgagctgtcgggtacacctcccagacggggtggcagccgggcagaggggctcctcacttcccagacgaggcggccgggcagaggcgccccccacctccctcccggacggggcggctggccaggcgggggctgccccccacctcccggacagggtggctgccgggcggagacgctcctcacttcccggacggggcggctgccgggcggaggggctcctcacttcccagacggggcggctgccgggcggaggagctcctcacttcccagacggggtggctgccgggcggaggggctcctcacttctcagacggggcggccgggcagagacgctcctcacctcgcagactgggtggcgatcgggcagagacactcctcagttcctagacagggtcgcggccgggcagaggcgctcctcacatcccagacggggcagtggggcagaggcaatccccacatctcagacaatgggcagccaggcagagacgctcctcacttcctagacgggatggcggccgggaagaggcgctcctcacttcccagactgggcagccgggcagaggggctcctcacatcccagacgatgggcggccaggcagagacgctcctcacttcccagacggggtggcggccgggcagaggttgcaatctcggcactttgggaggccaaggcaggcggctgggaggtggaggttgtagcgagccgagatcacgtcactgcactccagcctgggcaacattgagcactgagtgagcgagactccgtctgcaatcccggcatctcggggggccgaggcaggcagatcactcgcggtcaggagctggagaccagcccggtcaacacggcgaaaccctgtctccaccaaaaaatgcaaaaaccagtcaggcgtggcggcacgcgcctgcaatcccaggcactctgcaggctgaggcaggagaatcaggcagggaggttgcagtgagccgagatggcggcagtacagtccagcctcggccttcataactttggtggcatcagagggagaccgtggagagggagggggagggggagagggagagagagagggagctacaatttttaataaaggaaattttgtacaatttttttttttgagatgaagtcccgctctgtcactcaggccggagtgcaatggtgcaatctcagctcattgcaacctctgcctctgggttcaagcgattctcttgcgtcagcttcctgagtagctgggattacaggtgtgcgccagcatgcctggctaatttttgtatttttagtagagacacggtttcaccatgttggtcaggctggtctcaaactctggacctcgtgatccacccgccttggcctcccaaagtgctgggattacaggcgtgagccaccatgcccggcccatttttttacaatttttaaggaaagctacccatgagcccatttggtagcttgatactactaattagcaggctgttagctgcatgcttcctgggctccttccatgcactaactcccaccactaaagggcatcttaacctcagggtgcctgggttttgatgttttctacttaatttgacaagtgtacatagagagccgccatctgttaattaagagtcgggcatgaatagaacacaatccctgcacttgaggagccttttttttttttttttttttagagacagagtctcgctgtgtcatccaggctggaatgcagtggcgcgatctcggctcactgcaaactccgcctcctgggttcaccccattctcttgcctcacctcctgagtagctgggactacaggtgcccaccaccatgcctggctaattttttgcatttttagtagagacggggtttcaccgtgttagccaggatggtcttgatttcctgaccttgtgatccgcctgcctcggcctcccagagtgctgggattacaggcatgagccaccgtgtccggccaagcttttcaattattggttttcaactgactactagacaaaaatgatgacaggatgagcaaaggaccttggagttgagaaattaattcttcagggacaactctggaaggcttcacaaaggggtgacatttcattctttcaataaacattgattcagagcttaccatatgccagataaagtcatcagcttcacggaaattacttctagttcatatttcggagccttatataatagaaaatttgtgaggcaggattggaaagatgtaaattccaggcagaggggccgaagatgctgaagttcgtaggagcagactagagtatggaggatatacggagcataatagagcagacacttggaaaccagttagaaagattttacatgaacccaagcaagagaggaggaaaattgaaatgaggtatgctctgagtttaaaaaaaatgtaagataggctgggtgcagtggcccatgcctgtaattccagcacttttgaggccaaggcaggaggatcccttgagcccaggagttcaagaccagcctgggcaacatagcgcaaccctgtctctattatatatatatataatttttttaagggtagggggctgggcgtggtggctcatgcctataatcctagcactttgggaggccaaggtgggcagatcacctgaggtcgggagttcaagactagcttggccaacatagtaaaaccccatctctactaaaatacaaaaattagccgggcatgatggtaggttcctgtaatcccagctactcaggaggctgagacaggagaatcgcttgaaccagggagacagtggttgcagtgaatggagatcacaccactgcactctagcttggacagctgagtgaggctcggtctcagaaaaaaaaaggaagacagctgggcgcggtggtgcaccctgtggtcctagctactcaggaggctgaggtgggaggatcccttgagcccaggagttctagactgtaatgcattatgcagtttgggtgtccacactaagttcagcttcaacatggtgacctcccaggacaggggactatccaggttgtctatggaggggtgaaacagcccaggtcggaaatggagcaggtcaaaactcccaagctgggctggtctgatggtagtgggttattagaatttaataacattagtgtcactaaagttggtatacaaccccccactgctaaatatgactggcttaaaaaatttgttttaaaaccccaaagctcccatgctgatcaatagtaggttggcacctgtgaacaaccactgcactccagcctgggcaacacagaaagaccccgtttcaaaaaataaatggggacagaccccttaaacatattagaagtccagtgaataagacaacttgtgcgcagtgaatgttgggtggggtttagtaaaagggaagatgttgagttccatttgacacaagccaagttccaggtgcgttgtcttatgcctgtaatcccagcactttgaccagcccagcatgggagttttacgcctgtaatcctggcactttgggaggccgaggcgggtggatcacctgaggtcaggagtttgagaccagcctgaccaacatggtgaaaccctatctctactaaaaatacaaaatttagccaggcatggtggcgcacacctgtaatcccagctactcaggaggctgagacagaagaatcacttgaacccaggaagcggaggttgcagtgagctgagatctaaccactgcactccagcctgggcgacagcaagactccgtctcaaaaaaaaaaaaaacctggaagtttggggtgagttattctgggtttttttgtttttgttttttgagacagaatctcgctctgttgcccaggctggcaggctggagtgcagtggcgcaatctcggctcactgcaacctccacctcctgggttcaagcgattctccagcctaagcctcctgagtagttggtactacaggtgcgtgccaccacacccgactaagtttttgtatttttagtaaagatagggtttcaccttgttagccaggatggtctcgatctcctgaccttctgatccgcccgcctcggcctcccaaagtgctgggattacaggcgtcagccactgcaccctgctttttttttttctttttgagacaaggtctcattttgttgtccaggctagagtgcagtggcacaaacacagctcattgctgcagcctcaacctcccaggctcaagcaatcctcctgcctcagccccccaagtagctgggactataagcacatgtcaccagacccagctaatttttgttttgtgtttggttgtttttgagataagagtcttgctctgccacccaggctggaatgcagtggcgcaacaggttcagtgcaacccccgcctcctgggttcaagcagttcccctgcctcagcctctcgagtagctgggactagacacatgccaccacaccaggctaatttttgtatttttagtagagatggggttttgccatgttggcccagcctggtcttgaactcctgacctgaggtgatctgcctgcttagcctcccaaagtgctgggattacaggcgtaagccaccgcgcctggcagtacttttttgtagagacagggtttcgccatgttggccaggctgctctcaaacacctgggcgcaagccatctgcccacctcggtttcctaaactactgggattacaggcatgaaccactacacccagcctccaggctttaacttggtggtgtcattcactgggaggatgaaaataggggatgtcctgaagaggaagatgttgagttccatttgacacaagccgaattccgatgccagctgactacttggtggtggagaacttcagtgaagcagtttcataagcaaaactgctgaaggcttagacgttactagaagttgaagcagatagtggtgtagactactctgaccagctttggaacacatgagggaagcatgcctgggttgatccaaaattggggtttgacagaacgagaggtcttggaaggtcaagtgaagtaagaagttgccttgagagggcagctgaacattcctgagatccaatgacgaaactgaagcaagaggatctaagacctagaccagtgcttctcaaatttgatcccgcatcagtatcccctgaaaagctcataaaaccacagccggctgggcctcaccctgagttctttttttttttttgagacggagtctcactctgtcgcccaggctagagtgcagtggtgcaatcttggctcactgcaacctccgcctcttgggttcaagcgagtctcctgcctcagtctcccgagtagctaggattatgggcacacgccaccacatctggctaatttttctatttttagtagagacggggtttcaccatgttagccaggctggtcctcaactcctgacctcaggtgatccaccctcctctgcttcccaaagtgttgggattacaggcatgagccaccacgacaggccctcaccccaagtttctgattcagtagttctgggttggggcccaagaatgtgcgttactgacaagttccctgatgctgatgctataggcccagggggaatggggaagcacacttcgaaaacccctggtggagagtaaagcatcagcagcaggcagacgttgaatcatttccagagtgaatggatgaaaagaggcgtcttcttcaggaagagaggtcttcctgtagtcaaagactaggctgacggtaaggccacatcggataacttaaggtggtaggcagagccgaacttcagagtctggattcagagacgaagcaatttggggggacaaggtcgaggactgaccctgccaggggaatgataggagatcaaggaattgggtgttacaagggtattcaaaatgaattatttctggcagaggctacagtctagaggacagttccaacaggaagtgaagatctgaagggttggaagtagctacgccgggcctgaattctgtagcgctgaccgtgggcaggccctacagacagcaagcagtccatccacgttagtgcaccagaactagcaacaaaatctacgggaagtgtgcgatccctcagcaacaacgctgcacgctgtgtagcctcccttacagctttataggaaccacggcgagcacaccctgtgggggcgattgagtttagttcgtggtcccctccagcaggcattcccctccaaccgccgtactgatgagtgacggggatcaggtgctgaccgcgctacttaacacccgtgcaaccctcctcaaagctccttacctcctcatgcctcaggtttcccgcttaaaaatgcgctaatagcagtaatagtaaaccacacaacctcagcgagatgacacagtgaggtggttaacgtaaagctctggacacacagtgcgcacctatacatcagttattaagtgtcctgttggctactacaggtcctggccaatgctcagagttgcgtgtggcctatgagcctcacgttgcggcgggcgcgcgtccccgcacatctgcaggacggcgccatcctcctccttaacccgcccagctctgggatgttgttgcctgggcgggactagaggcccgggaggagtctgcgcagccgcagaagggcttgcagtggcgcctgccgggcgctgagggccgcgggagccgccgggttagccccaccccgaggggtcagggtcagaggccgccggatggcgtaggatcggccgctggtggtggtgataccgggtacccgggctatggcgccggcgcagcgctgccctctgtgccgccagaccttcttctgtggtcgcgggcacgtttacagccgcaagcaccagcggcagctgaaggaggctttggagaggctcctgccccaggtgcggaggcaaggctagagatgggatgggagtgcggggcaggtcagtgaaggccagagcgggtgtgatttgggggtccccctcggggttctacttggcctctctgcggcaggtggaggcggcccgcaaggccatccgcgccgctcaggtggagcgctatgtgcccgaacacgagcgatgctgctggtgcctgtgctgcggctgtgaggtgcgggaacacctgagccatggaaacctgacggtgctgtacggggggctgctggagcatctggccaggtgagagccgagctaggagcctgctccagcacagacgcatacatatacgggaggagggtttggggtgggtgagaaaaaggacgcttttgtgatttgatcaagaaggatggattgagtcacttcacaggttttgccagccttgttagggtaggggtcatatgctgccacggtcccaagtggtgctggtggtctggctgcgagagcccgcttggttaccgcccctaacctcccctcagattctcacaattttatgggaagaagagacacgagatcttgaagagatggtaacagtgttcctctctcagccgtgccccaggcagaaacccagatgtcagtttgcattacaaacctaatgcttaatatctgagtaatattttataatctatagctgagattacttatcctctccattttcagcccagagcacaagaaagcaaccaacaaattctggtgggagaacaaagctgaggtccagatgaaagagaagtttctggtcactccccaggattatgcgcggtgagtcactggtatggaacgtgaagtagcagagtgaattctctggatctttgtcaggtatgggagcttactctattaactggaaagttcaggagggacttacgaagaatctgctgtcttcatagcacttcttattctaggtactatattggacacaaaaatgtgacagttcttgaggtttagttgggggataggatttagcaaatagagaacaatactaaaagttgactgttatcaactacttaaatatgaggcaccgagaatactaacgttagaagaggctgtttatagtttgtaagaaactgctgctcagccagtacctacttttaatagttttggactctattttattttatcttttcttttgagacagagttttgctcttttcgcccaggctggagtgcaatggcacaatctcagcccactgcaatttcagcctcctggattcaagtgattctcttgcctcagcctcccaagtagctgggattacaggcgcaaaccaccacacctggctaatttttgtttttacgtttttttctttttttctttttctttttatttttcgctctgttgcccaggctggagtgcagtggcgcgatctccgctcactgcaagctctgcctcctgggttcgcgccattctcctgcctcagactcctgagtagctgggactacaggcgcctgccaccacgcccggctaattttttgtatttttagtagagacggggtttcaccgtgttagccaggatggtctcgatctcctgacctcctgatccgcccaccttggcctcctaaagtgctgggattacaggcgtgagccaccgcgcccggccaatttttgtatttttagtagagatgggatttcaccatgttggccaagttggtcactaactcctgacttgaggtgactcacccgccttggcctcccaaagtgctggggttatagacgtgagccaccatgcctggtctcaatgattttcttaatggtatctgggaattcatctgctgcctcttggttggcagaagctgccccttctgctattttgacatattttaagccaaccttctttctaaaattatcaaaccatcctttgccgacattaaattatccagctttagatccttcaccttcctttcgctttaagttgtcatgtaatgattttgctttttcttgaatcctattagaagctgtaggtaggactttctaataacaaccctgtacccacataaaagctgtgttttcaatatgaagataaaaaggtattgtgcaaagcatgcagggttttcatgcctcctggcataggtgcagtgatagcttcatgaatttccttttttttttttttttttacagtgttccttaggctggatttagttatttttttctttgcctttaaaaaaaaattttttttgtccaggcatggtggctcatgtgaagtcaggagtttgagaccagcctggccaacacggcaaaaccctgtctctactaaaaatacaaaaattagctgggtgtggtggtgggtgcctataatcccagatactcaggaggttgagacaggagaatcgcttgaacctggcgaggcagaggttgcagtgagccgagatcgcaccacttcactccagcctgggcaaaagatcgaaactctgtctcaaaaggaaaaaaaaaattcttttttttaaattgagatggggttttgctatgttgcccaggctggtctcgaacttctgggctcaagcaatccgcctgcctcagccttccaaagtgagccaccatgcttacccctcacccttttttttccacatagattttgtcaatgtgcatggattcatttatcttgaaatgctgggcaactgcagctgtagatcctaatctacagtacatatcaaacaattcagctttttcttgtaatgtcatgacttttctctgcttctttggagtgcttcaggcatcactagtggcacctcctataggtcccacgttactatttgaggttaatggtatgacattactgaaaaatatgcaggaaccatgagtgatcacttttactgtaatatgcaatttactggtgagacaactgcttacaagatgatcagcattactgtgttttaagcagatacaacacttgagttcactgcaataggtggctacaaaattgtgacagttgtagtttggattataattttatacagttatgtaatattgcatctttacatttattttcatttctcttgaccgcgaatgtcaccatgtacagtctgtgtttctgtgtgtaagttttgataaattttaactttttttttttggagagggagttttgctttgtcacccagggtggagtacagtggtgcgatctcggctcactgcaacctctgcctcccgggttcaagcgattctcccgtttcagcctggatttgtgtattttatggtagtaaatcataaaagactagtatctacatatattttatgcattcatgacatacctttttaattttttccatatttctaggctatgtggttcatctgcaagttttttcaaattgttgcaaatctccaaaaaaattttcaagtgaactcgtgcagttcaaacttgtgctgtgcaagagtcaactgtatttgcttattttctcaaaaaggaatgcctaaaggataatcaagaaactaatgaaactgccagatgtggtggtgcacacctgtagtcctagctactcaggaggctgaggtaagaggatagcttgagcccaggagtttgaggccatcctgggcagtgtatcaagaccccatctctaaaaagaaatacgaatttttttttagagaagttaatgaaattgatcacatggccatgctcagtggctgacacctgtaatcccagcactttgggaggccgaggtgggaggatcatttgaggtcaggagttcgagaccagcttggtcaacatggtgaaaccccatccctactaaaaatacaaaaaatagctgggcgtgttggtttgtgcctgtaatcccagctactcgggagggtgaggcaggaaaatcgcttgagcccaggaggcagagattgtactgagccaagatcatgccattgcactgcagcctgggcaacaagagcaaaactctgtctcaaaaaaaaaaaaaaaaaaaaaaaagaaactgatcacatatcagttagtgtaaccagttggtgtgacccagtttgtgggtcagtaaaaatgtttagagttgataggaatagaaaaaagatttttttttttttttttggacagtctcactctgttgcccaggctggagtgcagtggcacaatctcagctcactgcaacctccacctcccaggttcaagcagttctcccatctcagcttccagagtaggtggaattacaggcttgtgccactacgcctgactaatttttgtattttagtaaagatggggtttcaccatgttggccaggctggtcttgaactcctgacctcaagtgatccacctgactcggcttcccaaagtgctaggattacaggcatgagccaccacacccggcctagaaacaagatttctatgtatacttttaaaaataagctgttggtttttttttttttttctgatggtacatttgggaattatactgtaacaggcataagaagtaagatttctcccatgcgaaattttgtattcagaatccaatagaaatatttcaggttttttttcaagatggagtctcgctctgttgtccaggctggagggcagctgcgtgatctcggctcactgcaacctccgcctcacaggttcaagcaattctcctgcctcagcctcctgagtagctggtattacaggcatgcgccaccatgccttgataattttttttttaatggtgaaaagatatacatatatttagaattagccaactggactcagttgagatgatccctattttgttggcaacatccaaagcattgtaatcaggagccagtcgaacatgttccttctctccatcaggccgaatcagggtgttgaccttggccacatcagtgtcatagagcttctctggtgctgtggcttaacattcacagtgaacacaagtgcgtgtgtcttctgtcttcttcatggagactcagtggtcagaggaaacttgatgatgcatagtggtcaagcttgtttctcctgggggtgctcttaagatatttgcactgcctccggagtcgcaatgtcttgggccgccagaaggctagtgatacgcggatcttcttttttttgtggctgtggacacctttcaacactgccttcttggccttcagagccttgctttggctttaggaggggcaggagcttccttcttagcttttggtgccatcttgtgaaaaggggctgatttttgtatttttcgtagagatagggtgtcaccatgttggccaaactggtctcgaactcctgacctcaaatgatctacccaccttggcttcccaaagtgctgggattacaggcgtgagccactgcacccggccaataattagaaatatttctctctcttttttttttttttttttgggagacagagtcttgttctgttgcccaggctggagtggcatgatcttggctcactgcaacctccacctcctgagttcaagcgattctcctgcctcagccttccgagtagctggaactacaggtgcatgccaccacacctggctaatttttgtaattgtagtagagatggggttttaccatattggtcaggctggtctcgaactcccgacctcaggtgatccgcctgccttggcctcccaaagtgctgggattataggcgtgagccaccgagcccggcccaaattagaaatatttctaatcagatatttccatggttatagatatttggttgcttggttcatatgcatagaaacagttgtcataactgtaaaaagcagtacttagcaagtatttctaagtgattggaatagctttcctttaatgttacaatactgcctattgatttggaaattagatcacgctctatgatgtttcgattttactcaaaggcatcatgagtactctgctcattctttcattctttatagttttctagttgagttaggaactattttatcagaaatcattttagcattataataagggtagatgacataccataatgattttcagattttttttttttgagacagagtcttgctctgttgcccaggctggagtgcagtggcacgatctcagcttactgcaacctccgcctcctgggttcaagtgattcttctgcctcagcctcccgagtagctgggactataggcatgcgccaccatgcccagctaatttttgtatttttagtagagatggggtttcaccatattggccatgctggtctcgaactcctgacctcatgatccacccaccttgtcctcccaaagtgctgcaattacaggtgtgagccactggtcccagcctgattttcagatttttaataaaaagggtatctggattagctgggcatatagtcctacctactctggaggctagcctatagtcctacttactctggaggctaaggcagggggatcacctgagcctgagggatcacttgagcccaggaggttgaacctgcagtgagctgtgatcccaccactacactccagctgggcagcatagcaagaatgtctctttaaaaaaaaaaaggcaattcagttgcagtggctcatgactgtaattccagcacttttggaggctgagacagaggatcatttgagcccaggagtttaagaccagcctgaacaacatagtgaaaccccatctctaaaaaaaaaaaattatattagccaagcatggtgacatttgcctgtagtgctagctactggggaggctgaggcaggaggattgcttaagctcacaaggttgaggcaggagtgagctgtgatcacaccactgcactctagcctgggcaacagagcaaaataccctgtctcaaaaacagcaagaaaaaaaaagccaatacctggaaactttgaacagggtgaaaagaagaaaacacggaggagtctgctaaagcacaaaacttctctctggtcctcaaataaataaaaatttttggccgggcacgatggctcatgcctgtaatcccagcactttgggaggccaaggccagcagatcacgaggtcaggagatcgagaccatcctggctaacacggtgaaaccccgtctctactaaatatacaaaaaattacccagacgaggtggtgggtgtgtgtagtcccagctacttgggaggctgaggcaggagaatggcgtgaacccaggaggtggagcttgcagtgagccgagatcatgccactgcactccagcctggcgacatagagtgagaccccgtctcaaaaaaaaaaaaaattttttttttttacaattccacattgtcattttcttttcctctggtctcaaactcctggtctcaggcaatcctcccacctcagcctcccaaagtgctgggactacagacaagccactgtgcccagccagctgcctagaaatttctggacttcaaccacactgtaattttttttttttaatcagtttcttctatttccttgaactcagtttccaggaacttctggtttggaaattagagacctgccttccaggttagtctacagaaagtctagttgtgttccactgtgtcttcattgtcctgcacactcatgtgatacactcaggtgttgtggattatgagacccagagagaaacttcctggtgataatcgcacaaagtataggaaagaaacctggcagtctgtacagtccattattattatgtgcttagtccatttggttaaataatttgagatgcttttttttttttttttttgagatggggtcttgctctgtcacccagactggagtgcagcggtacaatcatggctcactgcagcctcaaactcctgagggctcaagcaatcctcctgccttggccttcagagtaggcaggattttttttttttttttttttttttttttttgagatggaatcttgctctgtcgccaggctggagtacagtggcgtgatctcagttgactgcaacctctgcctcccaggttcaagcgattctcttgagtagctgggactacaggcacaggccaccacacccaacctttttttttttttttgagatggagtcttgttctgtcacccaagctggagtgcagtggtacgatctcggctcactgcaagctccgcctcctgggttcacgccattctcctgcctcagcctccctgagtagctgggactacaggcgcccgccaccatgcctggctaattttttgtatttttagtagagacggggtttcaccttgttagccaggatggtcttgatctcctgacctcgtgatccgcctgcctcggcctcccaaagtctgggattacaggcgtaagccaccatgcccggcctaatttttgtatttttagtagagatggggtttcaccgtgttggccaggatggtctcgatctcttgacctcgtgatccacccgcctcggcctcccaaagtactgggattacaggcgtgagccactgcgcctggcttagtccacctatttctaatgtgactgggtcattcatcaacctctgtgatatggtttagctgtgtccccacccaaatttttttgactgtagctcccataattcccacgttgtgggagggacccagtgggagataactgaatcatgggggcgttttcccccatgctgttctcatggtaataagtctcacatgatctgatgattttataaggggtttcccctttcacttggttttcattctctctggcctgccaccatgagacatgcctttcaccttctgctgtgattataaggcctccccggccacatggaactgtgtgagtctattaaacctctttttctttgtaaattacccagtcttgggtatgtctttatcaacagtgtgaaaatggactaagacaccctgtcaacatcatctctctgctccagtgctgcatcttcaggagcccaggttccagataaatgaactgtagtggcagccagtggccaggagataccggcaacctaaatatagttttcttttcgtttcttttttttggagagagtctcgctctgtcacccaggctggagtgcaatgacatgatcttggctcactgcaacctccgcctcccaggttcaagtgattctcctgcctcagcctgctaagtaggtgggattacaggcacgtgccaccacgcccggctcatttttgtactttcaatagagatggggtttcagcatgttggtcaggctggtctcaaactcctgacctcatgatccgcccacctcggcctcccaaagtgctgggattacagatgtgaaccacctaatctggcctttttatttatttatttatttattttgagatggagtcttgctctgttgtccaagctggagtgccatgatacaatgacagctcactacagcctcaacctcccaggctcaagcaatcctcccaccccagccttccaagtatctagggctataagtgtgcaccatcacacctggctatttctgtattttttgtagagacagggtcactatgttgcctgagctggtctcaaactcctgggctcaagcagtccttccactttggcatcccaaagtgttgagattacaggcatgagccactgtgcccagcctaatttttacttttgaaccttgtaaattgtcaaacatacacacacaaggcaattccaaggtttggttgatttgactggtaaagataggaggaggcacttttagatttagatggtttcttacatagacagtgaaaagaaaaggaagaccaaagagccagcttctcaggtccttgtttcatacaccaaaaaggacaacactgaaacaaaaaggactggatgaccccagtgtgagttgtgggatattctgttgctggggaatcaaatctagactgtagtagctaagtggcttttttgttgtttttaaattttacttattgaaggggtggcctgcccctccacacctgtgggtatttctagtcgggtgggatgagagacggagaaaagaaataagacacagagacaaagtataaagaaacaacggtgggtccaggggactggtgctcagcacaccaaggacctgcaccggcaccggcctctgagttccctcagtttttattgattattatttttcattatttcagcaaaaaggaatgtagtaggacagcagggtgataataaggagaaggtcaacaaattacatgtgagcaaaagaatgtatatcacgattaagttcaagggaaagtactatgcctggacgtgcacgtaggccagacttatgtttctctccacccaaacatctcagtggagtaaagactacaaggcagtatcactgtaaacatgtctcgcctcccgccacagggcagcttttctcccatctcagagttgaacaaatgtacaatcgggttttaagccgagacattcagttcccaggggcaagcaggagatagtggccttcctccatctcacctgcaagaggctttcctcttttactaatccacctcagcacagaccctttacaggtgtcgggctgggagacagtcaggtctttctcatcccacgaggccatatttcagactatcacatggagagaaaccttggacaataccccgctttcaagggcagaggtccctgcggctttccacagtgcattgtgcccctggtttattgagactagagaatggcaatgacctttaccagatgtactgcttgtaagtattttgttaacaaggcacgtcctacacagccctaggtcccttaaaccttgattttatacaacacatgtttttgtgagctccaagttgggtcaaagtggctgggtcaaagtggctgggacaaagctacaaatcaacaacatctcagcaaagcaactgtttaaagtacaggtctttttcaaaatggagtctcttatgtctttccttcctacatagacacagtgacagtctgatctttctttcttttccctacaacttattattatttttgagacagagtcttgctctgtcactggcctggagtgcagtggcccgatctcggctcactgcaacctccacctccgaggttcaagcaattctcgtctcagcctcccaagtagctgggattacaggcacctgccaccacatctggctaattttttgtgtttttgtagagacagggtttcactatgttggccaggctggtcttgaactcctggcctcttgatccacccgtctcggcctcccaaagtgctgggattacaggcgtgggccacaccgcgcctggcttaaatgattttttaaaactaagtggcttaatattctgcaattttaatctgagaggggtggaacagaaagccccatacctcatcagaacctgggagttgatgagaaaccatttgatgacaacctcctaggggagatggggagggaagtgggagatggcctcatagcagcttctggcagaccttccaccctcgtgttccaggaggattaaacaagcctttcagccacaattcggtaaggtgtggctcaagccattgtctccttggatatattcaaggctctcagggaacactgttgatagtggtattggtattatactgaaactttgtgttgagaaccagggttttgagaaccagggttttcactatggcaaaaggaagatacaagtaaggaatggaggcatttgaatagggaggtgacagtacaaattactgatttaaggccaggcatagtggctgatgcctgtaatcccagttctttgggaggccaaggcaggagaattgcttgagcccaggagttcgagaccagcatgggtgacatggcaaaaccctgtttctacaaaaaacacaaaaattagccaggcatagtggtgctgtcctgtagtcctacctactcaggaagctaaggcaggaggatctcttgagcctgggagcctcttgagcagaggttgcagcgagctgaggttgtgccactgcactccagcctaggcaacagagcgagcccgtctcaaaaaaaagacaaagaaatttaggacagtatgcaagatttggcctggattcttctgaggatgtgaagtaatggaaacagtaagactgttccagactaggggaagactagagacctaatagctggattccatgtgatcttttgttggactttgggattggaggtgagagtagagaaggcataatgcacgtttttgagacgagggaaatgtgaatatagcctgtatgcctacactcaagtctgaagacatgtaaaccatgtctatactaaccagccaaatatttgaacactaaaaggaagaattttcttaatgtggtaatggtatcatggttgtatagaatgttcctcctcttgggagatgtgtgttgaaaatagggtttgacgtctaaacctattttgttttggcaaaaaggacgtgtgtctgtacaaaagaagtggagccagtatggcaaaatgtttacaaggactctgggtgagaggtacataggtgcttactatactgttttgtttctgaatttggaatttctcaaaattaaaaaaatatctactgaggagcttttcgttttaactggtggggaatgggttctgggtggttttgccccttttctttttagattcaagaaatccatggtgaaaggtttggattcctatgaagaaaaggaggataaagtgatcaaggaggtaagttaaagtagcagtccctcaccctttttgcaccaggggctggtttcgtggaagacggtttttccacagatggacccaggcaggggatggtttcagaatgagactgctccacctcagatcatcaggcactagattctcataaggagcacgcaacctagataccttgcatgcccagttcacaatagtgtttgtgctcctatgagaatgtaacaccaccactgatctgacaggagctcaggcggcagtgctgttgcagcctgcttcctgacaggccacagaccagtactggtccacgcctgggggtggagggcccaagttaaaggaaaggcctctgaagaaactggcccccatgatcctgtacctgtctaagcagcctctctcccacagatggcagctcagatccgtgaggtggagcagagccgacaggaggtggttcggtctgtcttagaggttggtttccctcggaggatccagaccagtatccaaatccactgatccctggcattcccaggtccagcatttcatggactagtgcttcttcttcttcttttttttttggagacagagtttcgctgtgtcacccaggctggagtgcagtggcacgatctcggctcactgcaacctccacctcccaggttcaggttcaagcgattctcctgcctcaggctcccgagtagctgggattacaggtgccgccaccacgcctggctaatttttatatttttaatagaggtggtgtttcaccatgttggccaggctggtcttgaactcctgacctcaggtgatccacccgcctcagcctgctggaattacaagcatgagccactgtgcccggccatgaaccagtgcttctaagagaactctgactgcattctcatctgcttggcttgaattcccttacctgtgtgccagggggcaggcctagtcagtgaatatgtggacaggactgggagggagggagggaagagtctgtaaaagatgggcagtaccttccatatgctaatttgtttccttcctgtgatactggggtctggagggtggaggcatggcctaggcaggctcttaagcatcccagacacatttatttttcctgaatcaaactcagcctcaggcagtgccagacccagaagagggctcttcagcacctagaagctggaaagggatgaacaggtaagactattagggaatctcttgttgggaatttgacatcttagaacattctgcaaccttttgcctgggaaatggaaacagatctaatctttaccaccctcatggctcaaggacctcatctggcagcctggctcatgtttttcagccaagtagcttccagcttacagcagccctcaaatttggacctgccaccagctccagagcttgactggatggagacaggaccatctctgacattcattggccatcaggtacaaaggataagcaagccagaagagggccaatggtccctcaggtctcaggacccctttctcctgattttctacctattcaagccactgctgcctccactgcaggcttttccttcttccttcactgttccctagtagtgttctcagacctcttctcaccctccaaagcgatcctattcacatgtattgacacttaggagtgccaactcctaaatcttgccctctgtagaactcatagttccaactcaacacaggacattaaatatcccacaggcatctgaaactaacccccaccactcctatatttccaatcactagatgcagatcctttccttttccatctcccatatcctgtcaacaagcggtcaattttaacctgtctgcctccattcagcctttgggcaatttctactcccccttcaatcctgcctcacaaacagaaaatcattgtaccacttatgattttactctacacttcagctgtattgtgttgcttcgggcttttgcagttgccattgtctaaaacctgctttccttccctcatcacctagtttaccttcaactgttagctcaaatgtcactttttcataaaaggcttatctgaacaggttatctctatttcaagtggatgtagcaccatgtaaagttgcaaatgtaatttacgtaacttgtgcttaatgctcttccccaattatatgtatgctgtgagggcaaggttttgctcccctggcatgtaatagccactctacttacagacatctccactgttatgactgtgagcttcctgaggacagggttgtcttagagtgacttactgtgctttcaaagtttaacatcagctggggtgcagaattagcattgtggcagcagtcacacccacctcttttaaagtgtgctttgtctatcgtttctaggatttttttttttaatcatgcctagactttaactagcactttttttcccatttccaactacaggatataccaggagttggtaacatccactcaggtaaggtccagggcagtgtttttaaaaccctgggagatttttttttttttttgagatggagtcttgttctgtcgccaggctggagtgcagtggcgcaatctcagctcgctgcaacctctgcctctcaggttcaagtgattcttctgcctcagcctcccaagtagctggggttacaggtgtgcaccaccacacccagctaatttttttttttttttttttgagacggagtctcgctctgtcgcccaggctggagtgcagtggcgggatctcggctcactgcaagctccgcctcccgggttcacgccattctcctgcctcagcctcccaagtagctgggactacaggcgcccgccactacgcccagctaattttttgtattttcagtagagacggggtttcaccgttttagccgggatggtctcgatctcctgacctcgtgatccacccgcctcggcctcccaaagtgctgggattacaggcatgagccaccgtgcccggactttttttttttttttaaataaagttggccaagataaagcgtatgtatcggtaaaagccttatatccagaatatatgaagaactgtcaacttgataaggaaacaacccaataaaagcatatgaataatgttcaacattagtcattagagaaatgcaaattaaaaccacagtgaaataccactacatatgtattggaatggcagaaattaaagactgatcatgccaagtgtttggcagtgtagaaaaaccaaaccttcatacactgctcttagaatgtaaactggtacagtcactttggaaaacagtttgggatacacctaccacattatccaaccgttccacccctaactagagaaaagaaagcctgtctacatagacttgtacacaaatcttcagaacagcttcacttgtagcagctccaaattggaaacaattcagatgtctatcaacaggcaaatggattaacaatggaatagtattccaggatgaagacagaattattgatacgtacgacacagatgaatctcagaagtccagacctggccggcgtggtggctcatgcctgtaatcccgacactttgggaggccaaggcaggcggatcacgaggtcaggagttcaagaccagtttggccaacatggtgaaaccccatctctactaaaaattcaaaaattagctgggcatcgcagcgcacgcctgtaatcccagctacttgggaggctgaggcagaattgtttgaaccgagacctgggaggcggaggttgcagtgagctgagattgtgtccagcctgggctagagcgagactcctctcaaaaaaacaaaaggccagaccccacctcaatgtccacacacagaaaatcctaaaaaatacaaaccaataaagcaactgaaagatcaccgattgcctggacatgaaaatattttaatgggggcagtgatacttacagggggatgtttggggtctagattgtaatggcttcgctcaaaagtcaccaaatttaagtgtgtatcgtttatgtcagttgtgcctcaaagccattttaaaatgactgtcacatatggggtatgtcgctttaaattagcctagggccttctaaagctccagaattcctgggctttgcttttagacatttctagctcttaatgaggagaggtaagctaacagctaggacatgtttcacaatagcctgaagacttaaaaaaaaaaaaaaaagccttaatttttttttcaggtgccacacctccctggatgatccaagatgaagaatacattgctgggaaccaagaaataggaccatcctatgaagaatttcttaaagaaagtaagtaaactaattcaagagaggatcgtctaaatcttcacactcaaaaatggtttccttgcctgtgtgtggtggctcatggctataatcctagcattttgggaggctgaggtgggagggtcacttgagcccagaagtttgaaaacagcctggacaacatagtgagaccccatctctatattcttcaataaagaaaaataaaagtttccctatcattgtacagaggaaaaacagaagttgaaaaaactccccccagaccgagttggggccaactttgatcacagctccaggaccagtgcaggctggctgccctcttttggccgcgtctggaataatggacgccgctggcagtccaggtatgtgtgttcagtgccgggtctccaacctacccatccaacctcctttttggagatgtcacccttcatcatcgtgttaaccctttatttcctttcagacatcaattcaaaactgaagctgcagcaatgaagaagcagtcacatacagaaaaaagctaatcatgctctctaccaactaccatgaggctaaaagcaaagtcaacaaacccctattataccttccaccaaattctttatcattgtctttcttaggaaacagacatactcattcatttgatttaataaagttttatttttccaaatgtacagctggttggacctgtaaaaaaaaattaaaagaatcagaaccataaagctttgtatctacctcctacaccatgagcccacacattcctactcacctattcatgcatcttcaccagcagctggagcatctccacccttggtatttctggtgtaaattacttgagctctgtgctttgaaaccagtttgataagtcctagggggagagaatagcacgatgagatgcttaacagatgctacaatagaaactagtaaggtttttggctgggcgcggtggctcatgcttataatcccactgctttgggaggtggagacgggcagatagcttgaggtaaggagttgcacaccagcctggccaacaaggtgaaaccccatctctaccaaaaatacaaaaattagctgggcatggtggcacatgcttgtaattccagctacttgggaagctgaggtgaggaccacctgaacccaggaattggtggttgcattgagccaagactgcccctccgcactccaacctgggcaacagaatgagactctagtaaggtttgttttggccgggtgcagaggctcatgcctgtaatcccagcactttggacaggtggatctcttgagcccaggagaccagcctgggcaacatggcaaaaccgcatctctatttaaagaaaaggaaaacaaaaagacagagttctctcagaggtgcccagaatggtcttaaaactccttggctcaaatgatcctcctgctttggcctcccaagtagctagaaatacaagggtaccactgcacctggctccagaattgcttaatctgacgttcggtaaccgagaatcctagtttttaacgatcatctatccttacttttcctttaaattagggctccattatcttccaccccccccccctttctgagacagtcttttgctgtcactaaggctggagtgcagtggtgtcatctcggctcactgccacctccatctcctgggttcaagggatcctcatgcctcagcatcctgagtagctgggattacagacgtgtgcccccacgtccagctaactttcagtagagcaggttttcaccatattggccaggctggtctttaactcctgacctccgttgattcacccgccttggcctcccaaagtgctagaattatagacgttcagtcactatagttagctgagccttattattgtggaattatggtaatcagaccatactactgagtagaccgtactaaatttctggttttaaaatttaatacatcaacaaaatatttaccataaaggttttaaacattttcaaagttgtttcaaaatagtaatctaattatttcaaaaacggttgtccctgtaattctatgcatccatttactcgaaacataaaagatccttgggcttcactaaactgccacagggtccacggcacaaaagtggctaagaaccctgagaattcatctcaggatcaggagtaagacgtcagaattacattactaacagccaatggtcaagccacgctttttttttttaattctgcttttccagcaaaaccactgaagatgcttaacatggtcaagacaatttaacctacaaaaacacacatgtaggatacacccctcacctttactaaggagctcctgaagggctgccctggccagggagcctcgaatcttcagtctctcagagaccacagctggggttataagtttatagttgggaacttccttacagagtttatcataggtagctttgtcaaacaagactaagttattgagcttgtcccgaactttgcctttggaccacttctgctcaccaaaacaaaacagaaacaagttagtatttctggcagaagcaccctttccctctcgagtaatctgcgtcagagaaatctgttccaccgttatcaaggataaattacacattactaaaacaaaaacaaaaaaaaaacaccgacacgtttttggccttcaaacaggggccgagccccactagatcagttaaaaataacacagcaggcacagcggcagacacttcgcacaacagacccattttcatgatcctaatgggaaaaagaacgagtggtgacgggaagataaactctcacattttgactctagaaatctacacctgaaaaaccacttactatacaagttacctattactagaggattacgagagagttacccctagtctctttcagagaggtcttatttctaccttctttttggccttgcccccggatttgttcactgggtctttgtctttcttggccgactttccagcgtccttcttcttcttgtcgtccttaggcggctgtaggagggcagcgggaatgcaaccaggtcctcaaatagcgccaaagtcccctaatactgcgccctcagcccccgcaaactccaccaccagagcacatgggccaagcaataaccgcgcccgccctgcaaccgaggccggcaggccaaggagcgctcccgccgaaggctctccccactgagtcctcaaacccaagaacgccggcgacttcacacccctgaagcttaccattgcgaagctcggagaatagcagcagacaccgcagcctcgtcaagatgtcggacaaaaaggaagcgctgctcagaaacgggcccaaaaaccaccgtccgctgtgagtacttccggggcaaaaggcggagccaggcagaagaagtcccacggcgaagcgctcgccctctagcctgaggcggaagacaggaagtggattctagttcccaagccgcaccgcctaaatactgccggagtctgcgctagttgtgacgcatactatagcgctgttttcctgcactgataaacgaaaagcaatccaccaggtctcggcagctaactttccggcactacttatgcccgagcgtgtcgctcccagtgcgcaagtgcagcaggtggctgcacggggggcgcgggaggaggaggaggaggaggaggaggctggggtggggccggcggcaagtgctgtgatgcggttccggggaggggccgtcgggtagaggctgaataccagtttccgagcggcaaggcagcgatggcgatttttagtgtgtatgtggtgaacaaagctggcggcttgatttaccagttggacagctacgcgccacgggctgaggctgagaaaactttcagttatccgctggatctgctgctcaagctacacgatgagcgtgtgttggttgctttcggccagcgggacggcatccgaggtgggctaggctcgggcccgtggcgggtgcgggggtgggagggccccagtgctgtagaagtgggctggttgtaggtgcggggttgggggaaaaggggttgtgtcgggtcccttgtcccctcggcggaatccccgggctgcaccttcgctgaccgttagcttcacctctgcagtgggtcatgcagtgctggccatcaatggcatggacgtgaatggcaggtacacggccgacgggaaagaggtgctggagtatctgggtaaccctgctaattacccggtgtccattcgatttggccggccccgcctcacttctaatgagaagcttatgctggcctccatgttccactcgtaagtcccccgtctcctgaacggcagcgcttgtaatttgtctaccttttcttaaatcgtcgttctggtgttatgaaaaacgcaaccgatccagatctagattttaggtaataacggcagtggtgtcatctttttttgctgggtggggaggggccgcggagttacccaggctggagcgcagtggcgggatctcggctcactgcagcctctgcctcccaggttcaagcgattctcctgcctcagcctcccgagtagctgggattacaggcgcgtgccaccacgaccagctaatttttgtatttttagtagagaggggttttgccatgttggccaggctggtctcaaactcctgacctcaggtgatccacctgcctcggcttcccaaagtgctgggattacaggagtgagccaccgcgcccggccgaggtgtcatcttacttaaagtcaacttctcttctctgagccttagtttcttcatatttaaagaaagccagtttaactaaatgacctttaaactttttctgctctcaattgtgatatcagatgtgccggcctttgcttaaacacaagcttagtaagcgtggcacatattcctagagtattcattttacccaaagttttagatgtaaaatgtcttgtaacaaagtatgaatgtaaaatattcacagaattc

SEQ ID NO: 9 - DNA, 196200 bp, Homo sapiens
gaattctacctgggactcattgaccccaaaacagacccaccaggactattcaagttgtgtgtgtgtgtgtgtgtgtgtgtgtgtgtgtgtgtgtgtgtgtgtgtgtgtgtttgtgtgctggggtagtgggttgtaaggatgtggcaggccaccttgcagacatccggggtcagagaagagggtctggacaggcatcccagagatgggagctggtagtcaagaatcagagtggctccccttggcctctctccagggcctcagatccgcttcatgagcctgcgctgcaccttcccgtctgcttcccctgctgcccctcctgcatgtggaacttcagggtgtgctggcccacaccccacaggacctttcagctccagtccccaccatcagtggatgacctcactctgacttttggtttacatctccaagacagaattgtactagtttctcttcgggacagaaatccttccttgcccaaaagccagccctaccctttctccttaaacaggagacttgagcagaacaattgaaagcagaaggagaaattggtttgggctgggaaatctgcccatgtctctggtcccaaatcctaactcccacaaccccccatgagaatctgtaggacttagatagcctgtcccttctgattagtaggcttccccaggttgggagtcccctggaatctttcccaagcagtgatcacagttccctcatttcctacagtgcaacaaaataaatcctaagggataggtcatctggattgggtttgggaaataatgagaaggggctgggcacagtggctcacgtctgtaatcccagcactttgggaggccgaggtacacagatcacttgagtccaggagttcagagaccagcctggccaacatggcaaaaccccatctctacaaaaaatacaaaaattagctgggcgtggtttcacacacctgtaatcctagcttactctgatggctgaggcatgagaatcgcttgaatccaggaggtggaggttgcagtgagccgagatcatgccactgcactccagtctggatgatggagtgaaattctgtctcaggaaaaaaaaaaaagaaaaaagaagctctgtgaattttacccccgtggttggaatatttgtaaaatgcttggcttccctttcctgcttcagtcagtgactgttctgggagtctctcttctagcccctgtcctggggctcaggcattgctgcagtggccactggtgtctggtgtgggagatgggtagaatcagctatctgtggggtcgtgtgttttgtttttttctttaaataatatatgatgtttcctggccattttaatgttcttctgggacaggaagagtagaaaaatattccggttgactgagaattctagttagtatcagaggtagagtagaccttagtaattatctagttcaaagccggcgttttacatggaaggaaactgaggcccagagaagggatgtgacccaaacaaggtcccatgcgaagtcagaaactagatttcttattgggcttttcttcccagaccacgttcatatctggcctcttgctgtattctctttggctcaggagggaaaggaggggcagggcaagacaaagatgccgtgtcttggtcataggtgggaaaactgaggcacagagtgacttcgcagtttgcccggccctaggtagagtcaacataggcatggtaggtctccacttttgccataagccctgtggagccacagtgaccgccatgggttagggaggtgtgatgtcaggctgttggggtttagaagtgaagccaaggggcctggacaggggaataatgagggaagagaggagactctcctgaccctccctcttgctcccaggcacgacccctgacccgctacctgccaatccggaaggaggactttgacctgaagacacatattgagtcatcgggccatggtgttgatacctgcctgcacgtggtgctcagcagcaaggtacaaggcgtgtgtggccctggggtgctggggagagggagaatcccgtggtgagaggcacctcctgggtcgttggaatagtggcgtcagtctctaccctcacctaaccagatctctgtcccaggacctggtgtgctggcctgaggagatgttggggacaatcccccatgaatacaggcacaggcgatggcacacacttaaggcttaagggctgcatatttgggtccttccttactcctgcttcctaccaggtctgccgtggctacttggtcaagatgggcggcaagattaaatcatggaagaagcgctggtttgtcttcgaccggctcaagcgcaccctttcctattatgtgggtgagttcccacaaggccaccctgggggccagccaggatccctgggctctgttacccaggacggctggtcttctagaaggaggccaagcttccaagtaggggaccagagtcttgggctaggctttgccctccttccctgaaaatgtacacaatgtacctggttcacctccatttttgtgttcattcattcattccttcattcagcaatgttactaagcatctagtaagttctaggcactgttctaggctctggtgatgagtaagatggccacagcgctctcatggagcttataatcrgggaagcagacaagagtgataaccacgcacaatgggtatgctgataggagacatccaggcactgcaggagcatggggtcttatggtcagagttgggctgggaactcccccttggacaaattccatcagagattccaagacaagcagttgaacagtgccaaagagtgctcaggatagcccaggaacaggccgactagaccctcttgctctctcagctctctccgttccagcatctagcctagtttcccatccctggaactcccttgtacttttcccacttggagcgtgggatgctgtgttataccctagtcaggaggaggtaaggtatgctgcagtaacaagaagtcataaaatcccagtggctggacaggtgcagtggctcacacctgtgatcccaaaactttgggaggccaaggtgggcagatagcttgaggctaagagattgagaccagcctgggcaacatggtgaaactttgtctctactaaaaatacaaaaattagctgggcgtggtggcatgcacctgtagtcccagctactcgggaggctgagcacgagaattgcttgaacccaagagacagaggttgcagtgagccgagactgcgccactgcactccagcctggacaacagcgtgagactctgtctcaaaaaaataaattaaaaggccgggcatggtgtctcatgcctgtaatcccagcacttttgagaggccgaagcgggcagatcacgaggtcaagagattgagaccatcctggccaacgtggtgaaaccccgtctctactaaaaatacaaaaattagctgggcatggtggcacgcgcctgtagtcccagctactcgggaggctgaggcaggagaattgcttaaacccaggaggcagaggttactgtgagctgagatcgtgccactgcactctagcctggcgatagagcaagacgccgtctcaaaaaaaaaaaaaaaaggaaatctcagtggcttacaagtactaggcttccttatgcccaatacatgtcgactgcacattgtgagttggtgggggctttgctgtgcatcagcgttgtctttgcttcagcatggcttttgggaacatttctggccacagtggcagagggaaagagaggcttaagtgagcccggccttggtattaaatgtcctagttgggaagtgacacacatcatttctgtccagaagtcatagatggggctgtctgccagtcacacagcctcacctagccacacagctgggaagagcaatcctgctaggagctcagaagaggggaaagggctgcagagtttggtgccagagatgctcaggtctggagtgcccacttcccccctaacctggtccctgatcacctgctggcccctctaagaaaccttccctgaccaccctgggtcttgggtgttttgaggaggcaggaggaccagaagcacaggtgtcccatgtttctctctgggccaggaaggtagagggactagggactttggagaggaagaaacatgcctggggaaaggagttccattttaggcatgttgagattgaagtgcctctgggacatctaggtttaggaggatggtcaggattagaggtggagtaatagttgaatcaggtggaataatagtaatagcagatcacctttatcaagcacttgcatgagccaggcgctgtgctaagcactctgcatgcatcatctcattaatctttgaaataatcctatgagggaaacactatttttatgccattttaccgatgaggaaaatgatgctcagagaggttaagtaaattgcccaaggtcccacagctcctaagagacagagataagactgaacctgggcagtcagactgcagagcagagaagaggggagggagagggccgaaccctggggcaggcctacccgtgtggggaaggagaaagaggagagaccagcagagggagaaggggcaggagacaggaagccagcactaaccacatgccaggtgctgggctggtgcttggcatatgtggccttagttagcgcctgtggaacaaaaggagactaagttcagatggcaggaatagaaatgggagcagaaacagggaaggaagccagccaaaggagcagacattcacaagcaggaggtgtcaccagcagtgatggatgctgcaggaaggccaagaaagatgtggcccaaaggctgttagactcagggatgggagcttgtcaagagaaggctttctgctgtgcatggggccaggagccagactgcacaagattgaggataggtgggtggtaaggaagcggaggcaggagtgtgttactatttcctgtgaaggaagggatgggagagaacaggagctggagggctgagcaggcccagagccaggcagggctggtcctttaccaaggaggaaatgtcagaaatgggcctgtggctggataagggccatgggtgccttgcctattccgcttggaccctcttcctgccaactcgatagaaaccccctcattgcatggagtccagattacgtattatatctaggaagcctttcctgaccccaccttactaggagtgattcccaccctcctctgaacccctgcattatccagcatctgtttttccatgtgacatcaatccaggagtgtaatgatataataacagtgccacgttatgtgccacacactgtgctgaataccttaaatgtgttctttcatttaatactcatgacaacctgtgatgcgtaggtggtctcatggggttcctagccatgcctttagtagctatttacatagctgtgtgtctgtattttcctcactgtgagattgtagtttcctaagagaagggtctctgacttctctctgaatcccagtgtctaggactcattccttcagtattgggtacctactgtgtgccaggcacatagttgtttgtgttgggggaggtagaccatggaatggataaaggaggattcagattcagcataagttctatacagaggagcatctgtgctttgggaacacaggagagcacaactgtgcactgtcgtggtgacattttgcaatgggtcttgaagatcatttaggagtttgctaaggaaatgggctggaggagatagttccagcatacagggtgtattattaagggaacagtgagaagctcagataggacttgggactcatgcaggggaaggttatgatacaaggctggagggacatgttggcagcagtccgtaagttgcctttaccaagctgcagaggtcggggagaggaggagcactcgggaaggaacttacttccagccggcaccattgaatttagtgattcgcgtgacctctcctgtaggacgcaggctcactgttaaggatgtcagctgtagcatctgagcagtgccacagacaagttggcccaggccctgtgctttcccttgacagggatcctgccccttctcactgaatggtcacctctgctcaggtagtttgcccctttcctgccacctctgacctccagaggctatatgctatatgtatatgctaactgctctgtacacatcaagggagtgtgcttcctatctttttttttaaaaaataggtaaaagtattcatatagttcaaaaataaaaaatatataaaaaggtttaaattgagaattatgccccacccactacagtaactaattttataaatctcttgtgtatccttatagagtttctataggagaatataaacaaatactttttcttgcacaaaaggtggcatacagtacattctttttacctcctaatgtgtcttagagatcattttatatcaaatttatctatatctagacattatatctcgatataaattatagacttatttctgagtctgtatctgtatcagatatttctttctttctcttttttttttttttttttttttttttgagacagagttttgctctttttgcccaggctgaagtgcagtggcgtgatctcagctcactgcaacctccgcctcccggattcaagtgattctcctgcctcaggctcccgaatagctgggattataggcatgcaccaccacactcggcttatttttgtattttgagtagagacggggtttcaccatgttggccaggctggtctcgaactcctgacctcaggtgatccaccctcctcggcctcccaaaatgctggaattataggcatgagccaccatgcctggcctatatcattttacttaacagctgtatttagtcttccatgatgtgacacacactaacttattaaccagtctccacttgattgatattttggttgtttccaatcttctgtgactgcagacaatactatacttaataatcttgtgtgtgttactttgtatatgtgaaagagaaattctcctaaatgtaagcattggatcaaaagataaatgcctttctaattttgatagacatggccaaattgttcataagggttttaccaatttatactcccacatgtcattagactgcctccttcaccatagacttgccaaaagtgtgctgtatatttgttgtatgtttttgtcattggggtaggtgagaagtggtatctcagtggagttctgatttgtatttctctgtgattatgagtgaggctgagcattatccatatctttaggattctgtattgggttctgtttgggggtcttgggagactaggatcttcaccccatttcccagatttggaagctcaggccatggagctccacgtaaatggagctagacctgaagtgtgaccggctccatagcccacccttacttgctttgcagacaagcatgagacgaagctgaagggagtcatctatttccaggccattgaggaagtgtactacgaccacctgcgcagtgcagccaaggtcaggggtggagggcaccagaggggggccagagggacagccatggggaaggggtggcctggtggggctctgggagcaaaggcctccagcctgccctctacagaggctccaacccagtccttgttctctttgtcaactttctcttcctttctccctctccccttcccagaagaggtttttccgcttcactatggtgactgaggtacccctccccacttagctgtaaccagcacattaacacctcctgtaccccactcatccctgacccttgacctccccttcatccccctcccttcccccaggcccaagggaggagcagaaagcaggttgcaaagagcaagaagctcctgtgggcttgggtgcctctctctccttgttgcctccctctcctggaaatgacagcagaccccatgggggtctggtgatagagaagggatggccggaaggggtggaggggacccttaaagactagatttaatagggagaaattgataaacaggagatattggaggctggggcctgcttccctagtgcaagtcagccttcctgcccccagccctctggtgcccaccccagtcctgatctctgctcctctggggtcccagggcctggcatcctacttgttgctttttctgtctgccgctgttttgctgagaggaaactctggtcctcactggaaaagcctttgtgtttgatcctcttgatactcacttttgaacctggggcgccaaggaccagtgccccccttgtcagggtatagctctgtcagggtccagggagtttagagagcccaggactgctgtggtgtgagaagggaacatttcagcctggggctcacatggactggtagggtctaggctctggacctatttaggactaagctccagggctttctaggggctgggaggggaaagggcagatagggaggcaggtgagaatattcctgggcatgggtgagccccatcttagaccttcctctcttcctttggcagagcccgaacccagccctcaccttctgcgtaaagacccatgaccggctgtactacatggtggccccatctgcagaggccatgcgtatctggatggatgtcattgtcacaggggctgagggctacactcagttcatgaactaactgccgtgggcctcctggcagagcacaactggggcttttgtataagaagactttaatattctgtaaggagcttggtcctgtgagtttctgggctctggcctcctgaagaaccagccagaagaagaaaagtagaggtggctttgctgcctcctgggagcccagaacttgcagtaaccctttagggtcctgccccaggcccagccagggctgaggagctgtcacagagagggcctcagctctgacctgacacctgctctccccagcctgttttctcttttctaaaagacaaattatggtaccataagctgccaaagatcccctcctgcctcagacccctttgccaggggctttgggggctgagcagagccacatccagagtggggtaatagctcaggcggcccgcttcccatttctcaaaccccgctctgccccattgttctcctttcccttatactttttattaccttgctcaagggccagagatctcaagtgtcaaccttgaggtcccagctccatcccctagttgcagactcatcaccatggttaccatagtgactgcttcattgccatggttacatactaattgctgcagctctgtggcccagcccactgcttcagctgtgggccatctgagggtacgtgccatcatctctccagcccaggcccctgggcatctcatgctggggggaagggactgaatacctttttccttccccctgcctgtgtcttcagccctgatgcacaggctgccagccccccagtccagccctctcccttccactggtgccttgcttagagccagaagggatgaagccgggggatctatggaacagaggaggagcgatgcagttgggagaggaagctagaagggttatggttggagttctgtacagtgttgagtttccgacagggaaagaggattcctccaatgctcctagagagaaagcctgagcaggagatgatgcagcagaggggaagggccctgtggtgccgccgcccttccttcagcctccgaagggtgatggaaatggagagtggaggaccaggcctccagctgtctggcctcgcccttcacgccttaacactaagcccacctcccctgctctccttcccagcattgagcccttggttgcctgggcccaggctgggggttttcagtatttgtaagcatttcagcagaacaataaagcctttggactacggaagtgagtggaaggccggtgtggggcttggcgctgaggcacttggggataggtcttccctccagagcaggatttccaccctattcaaggttccaggagggagctaggcccctacccatgacctccaggtcgtgaccctgccctccacttcgctctgaggacaggctgggaggtaggagggcatgaagaggcaggggaaggcaggaactggtgcagaggtttaatggggcaggagctggggccaggtgaggagaggagggctgtcaccatggcaggaggctkagcaggaggctgggcagaagggtggccgccaggcagtggggctccaggaaagscagcttggsccctgaggtcagccggtcaccatagcggtccagcagcatcaggaccacgccattcgtccagccaaatccctcctgggagaggcagggcagtggggccagtttctggggaagcctcatacccttggtgggggctgtgggctctctccccaggggcactggccctgcctaaccccagcggtacaggaagcaccagtcagctcctcccccgggcccacatgcaggtgagcacactgaggcctggggcgggggtcatgagcagcagagttcaggagttccctggtgttggccagcccacccctggcctgctcacctgaacttcatattctcctcccccaccgggctgtccaccgttgctgacgtcatactggggacaagcgggtgggctgtatgtcaggtactgccccccagctccaggaacaacaaacaaccagagcccctggggagaagctgctctgcctgcccagcagcccctgcagtgctcaggagtggccactgggacagcctgggggtgcagggagggcttgggccagctcaccttctcatacatggctgacttctgcgagtagacatcaaaattggttcggatccaattctgagccagctggaaagccacttcctgggcccgacgtaaaggtgccttggccaggcctagaccccattgcaggcaggactcaacctccaggtctcccatcccagacagagcagtggctgcaccctactctccccaaggagggaaagaggcctgggccctaagacttccttcctgagaccacaggccaaactgcccttaatcgacggccctggtttgaagggcgaacaggactgattgcactggacaggctgggtggacataagtgtcaagtggaggccaggagagcagaggagcgagagaaaggatacggggcctcttgtgtcttttgttcatgcctccccagcaccagggaggcccacctctacaccctgggaagggtccttggctgtgtcagccctgcctccctacctctgatgaccaggtcctgcaggggggcccaggcattggggaaatcccactgctggcctgtcttctggagagaggtcgggatcccatactggtaagtcaggatccggttgtcctagaaggtcccagacattcccatgactgtgggtggggctggactgggagccaggacaggacgctggaccccgcgggaagccagacgtccccttcctggctcttcttttctcggctcacagctgccccccggtggctctggtgggacccgcaggctgggacaaggggcatagccggaggaagcgccctcccctgcaggtcctgttcagggtcgggagggggcggtgctgcctgcagtggacccgagccacctgctgtgccctcacctccaggtatttcagagccttgtccgccacgccagggtcagagaaacacccggcccagagtggagtgaggttggatgggtaaaactcccggtttttcttcttcttctcaaggtcgtaatcgaaccaggctccggtctgctcatcccacaggactgtgttcagggcggccaagcgctgcgaccgcaggattctgtacttcgtggcctgggagtcgttccctggggcagtgctgcctttagagccagcagccagtgccctgcctgctgccccaggcttttttcgtggttctactttagcctccccgctttgtgtttctctgcaaaggctgagacaccctgatgaccaaggggatgtgccgatctggagcccaccacatttctggcctatggccccgcactgctcccagggaaccactggagctgatctgtccccagggtctccagggtctatcctcccaagggtactggctgggtggattcccctagctcttagggggtcaagggcagctgtctgagggagagggagtggaaggattttggatgcgtggactagggttcccctcacagaccctagagaccctcacagtaagaaagggaggaagagaggattagggttggctccgtttgttctcttgtctggtacgcaaatgtgagtgcaggcttccactagggcggggctcgacaggctaagttgctgaaggcctgtcacacaagggtcctacttccagttctattgccaagcctgagcaggaaaccaagctccctgctttcccttccctactggggtgctcacccagcctggaatagaagttgctcatcagctcctctgcttggcataggaaggcattcaggtcaacaggcaccagtttgcttgttcggatgccgctaagcgagttggggtttgggcctccaatgagccagcgtgaagagaagtcccagccagactcagccccagccttgagctcagcccacagagcctcccggtctcctgtgaggacagagcagggaaccagccagtcccggctgcaggataggcagccattgacaggagaccagagcctgacacagcaggtgtgcagctgccctgcccccagccctccctcaccctcctgctgctcaccttctggcaaggtgtcagccaactccacatctttgctgtaggactcaggcctggcaaagaggagaggtgggcagcctggcactagtagctactaagcccctctgtggtcaagaagaggctgagccatcttgatccagctgcccttgggccccacagcccaggattgcagagggctctcggtgtcaccatctgagaggccaggctaagtcactcctcctcctgcccggggcattgtgatgctctaaccagagtgagcaggtaagagattgaggggtgggctgcccagttcctcacctgggtcccccataagggacataatagcgattcaggaggtagttctttccctccaagctcacagagacagtcctgttcttggtccaaaagtccaattccaaggctagtgtttcaatgttttccctggagtgaagcagacaacacctcagcccaggcgtgctgcccatccccagccctgagaggtctgagggatgggtgggtctgcagagcagcacagggagggtggtacccactgtagaaaggcggtgtcattggtgtgagtcaagtagcaatccatcatgagggtcaagagtgggggctggctccgctgcaggtagtacacgcgcccaccattggggacatgcccatagctgccaaggggaaggcctgctgagatgccctctccccagcaactggcaccaaggcaatccagctgcatgcccgtggcacacctgcctctcctccccacctaggctggaggtgcctggcccccctcacgttttcaccaggtccaagaagttctgcagcatgcccttcaccgtctcagccatctctgagaggagcagaccctccatgacccagtaggagtccctggggaaggggcagcttaggcaccaccctgctgcctccctctgccctgcacaccagccagtggggcactctgccctgctgaagacaccctgctggccctgggtttctccaccactgccagtcctgcaggccccttggtctcttgggcctgggcgctcaccagtagtagaactcaacaaagcgaccgccaggcacaatgaagggatgttctgagtagatgagagagaaccgctcagggtggctgagaacctctggcttcatctggagtcgggagagagggcaaggggagcctagaatccccacggaagcagaggctacaggcagctgggggatctgaggccccgggagtcacagctttggagccaggcagttgggttcagcgctggctccactgctactcagccatgtaatcaaggcctggccgctgggagccttggggtcctcatccctcacctgccggccttgggagtcccagctcaacttggtgccgggtagaagacccgaccactgagccaggcactgggcaggtatccaccaagcagtggccattacgaagacccagggtgggctgggtgggtgaggggggtgccagccccccatttccgctctactccccatccttgctgccaccacccagccgggcccagaggattggcccatcacccccattctctgagccaggtggggataaaaccccaaaccctttccccaggtgaggggatgtggatgagcaaagtagctcaggacagggctgaacacagggcctggccccacgcagcagtagcactgattcctcctgagacggaggcctggcccaggagctcagggaaggagagagcccagcaggcagtgaacatctacccagtggtgccagaggcagtgctgggcagcctggaggtggcagggcaggctagggtttcctggggaggctagggagccttcctggaggaggcgagatgttagaagtagatgctgcccttctgacctcagaagttctttctagagggcctctatttggggacccaggggccagggactggtttctcaggaaaggaaacctgatctgtgctccgaagacactgtgggccccaggcacattcctctcttcagttcccttggtcaggccttgggcaggcccaggacgctgataccttcttccccagcttcttccagagctgatgcagctgccctgcccaggcacgcagtttggcatctgaaatcttctgcaggaactgggggctgaaagaacacaggccccacagggttcaaggaggcagctcagttggaaggaaccctctcttgttccccttccagagtcatacctgtctttccagtctgcaggggtccagggctgcagctcctgccccttggcctggaagtgttcgtggacaaacgcctgcagctgctccctggggatgctgtgattgtggtccctggacagctcagtgaaggtctgcaggacttgttctggagagcaggcagcagggaggggtcagcagggtgtcacaagccactccctaatcacaggggcctctctacttggtcttgccccctgccttctttggagagaaggttctctggagaggacgttcagccctaggtgcttcacctggagctatagacagtggcatgtccacaaactgcttgtcatcctggtagagcttggccatttgaacttggtttaggagctccccgtggcagtaaatctcactgcagagacagggataggagcaggtcaggtcaccaccaccaccccattaggacagaagagaaggctagagtctgtggtagactggtcaaggcatgttccctgggactggacaagggctgtgtgtgcgtgcgtgtgtgtgtgtgtgttaggagtttgtgggttggagtgacatacagggctgagggaacaagtagggtctttgggcagtaaagtacctgtccgactgcctgagcccacactggttgctaatttgagatggtgtagaatagctggtggacaaagggaggttagcactttaatcatactggtgtggccaattctctgtacaatggccctgtgtagactcgatcggaagggcttatggcagaaacctgggaggtgcactcagtggtgatggctgagattgggccagaacatttccaggcggtgtatggtataggccatttgagagacaattactagctggctcttgggtgtttcctgaaactgcctccatgacggcaggacacaaaataatcctgaaacctgaaatacccataatgtcttgggtgatgtcagaggaacactttgtaacgaaggcagtgcccagaagagttcctgaataaaatggaaatggtttattcaggagtctgctgctcagggaatgcaaggaggtgctaatggtattcaggagcaggaagcctctttccccctagggccaactttggaagcaccgaggagctgatggatcctagtgccacatagaaggggccctatgaacagctcttggttgaacaacaaaaagctgcttggtttatgggtagaaagaccttgtttggaaggcctttgcactctgactgaggatggaaaatctttgaagaaggtaagaacaaatcacctcagtggactgaattgcatgctgttttccttgcagtgatagaagaatcgaatgataaaagcccctgtgtttgggtttttgctgacttatgggcagtagccaatggcctggcagatgggcagtgaaaaactgaactattaaagtgttgcccacctggggcataaccctatggaaaggtaaggggcacattaaagtagctttgcatatcaggtcgtagatgcaaatgtgcaaaatactacaagatgctatattagaacagaagatgctgtaccaatatggaccaccaagttacatttcttcagatccaagaacacaactgacagcacctagtgtccaacaatgggccaagcaataccacagcaaatggacatacggtgttgcataccgtcctcagagtagcgctttgatagaaaattggaaaagagagtcgaaacatttgctgtctacagtgggggagggagataaaagcatgaaggggtggcttacataccttcaaaaatgtgtgctctggccgggcacagtggctcatgcctgtaatcccagcactttgggaggctgaggtgggtggatcacttgaggtcaggagttcgagaccaacctgggcaatatggtgaaaccccatctccactaaaaatacaaaaattagacagatgtggtggcacgtgcctgtgatcccagctacttgggaggctgaggcaggagaatcacttgaacccaggaggtggaggttgcaatgaaccgagatcacgccactgcaatccagcttgggcaacaaaagcaagactgtgtctttaaaaaaaaaaaaagtgtgtgctcacattcagcttgagaggagcaaagggaggtctccattggttggattcccctaatttttctgggggatctgggaagagggagggcggagttgttggtatgactatatgatttgttcccacatcatctcaactacttttttcctacccaatacagtggccccacgactaggactgcaaatgtgggtgtcagaagaagggacaattctcaaagaaaaaactgcaactggctgggtgcagtggctcacgcctgtgatcccagcactttgggaggccgaggagggcggatcacaaggtcaggagaacgagaccttcctggctaacacgatgaaaccccgtctctactaaaaagtacaaaaaattagccaggcatggtggcgggtgcctgtagtcccagctgctcaggaggctgaggcaggaggatggcgtgaacccgggaggcagagcttgcagtgagccgagatcacgccactgcactccagcctgggcaacagagcgagactccgtctcaaaaaaaacaaaaaaagaaaaaactgcaactgtacctttaaaccttcatgccagatttactaagggcctgatggggtgtgttgtggcttcacagcatctggctaaatttggcttcttagtgaatgcagctgtattgcctagtggtcaagatagcccactagttccgcacctttgtaactcttccttatatgcatgggagcagactgagggcgaggcacctgcaacactactattactgctggcaatgtggatcagcacagtggccaagcctaatgtcccttacaaaggtggaaaaatttggtaaaaatcaatgataggccgggcgcggtggctcacgcctgtaatcccagcactttggaaggccaaggcgggtggatcaggaggtcaggagatcaagaccatcctggccaacatggcaacacccccgtctctactaaaaatacaaaaattagctgggcatgatggtgcctgtaattctagctacttgggagtctgaggcaggagaattgcttgaacccaggaagtggaggttgcagtgggccggtattgcaccgctgcactgcagcctgggcaatggagtaaaactccatctcaaaaaaaaaaaataaataaatgacagatggtgaggaagagacatagtagctgagggtaaaggaatgagtaaatgggttatacaatgaggggaatccaatatcacattggtgtctggagagactcgaaacaagagaataagattgtctcttagcacgattataccagatgcctgaaagggggaagccatgcatttgccaagacgactcctgctgttgggccctgacaaggtcaaatggcagcctgcaaacctgagtggcactgctctgagatttggtcatgtgatatgatgatgagctgcactaattgctgacaacaggatgtaactctagcaatgcgccagagacttttgactcttaattttcaggttacatctactacgaaggataccatttgggaaggaatttccaggaactactctttttggggcctttggattgtgtgatttacaactcatggcagactaatcactgtgtaactgtaaaccttgatcactgaatgcttagaaaggtctccagttaaaatgagcgaaatacagcagcagcatggccagcctgtcccaatgagctccatgcacaaatgcagatcacccttgttttcgtggatgaaaagctgttaaacagaatagaaaaaagttttattttattttttattatttttatttttttttagacggagttttgctcttgttgcccaggctggagtacaatggcatgatctcagctcaccgcaacctctgtctcctgggttcaagcaattctcctgcctcagcctcccgagtagctgggattacgggcatgtgccaccacgcccggctaattttgtatttttaatagagatggggtttctctgtgttggtcaggctggtctcaaactcccaacctcaggtgatccgcccgtctcagcctcccaaagtgctgggattacaggtgtgggccactgcacccagcctattttttctttttttagacaagggttcgctctatcacccaggctgaaatgcagtgatgcaatcacagctcactgcaacctcaatctcccaggcccaggtaatcctcccacctcagcctcctgagtagctgggactacaggcatatgccagcatatccagctaattttttctattttttttgtagagacagggtctcaatatgttgcccaggctggtcttgaactcctgggttcaagtgatcctcctggcttcaagtgatcctcccggcttggcctcccaaagtgttgagattactgtgatgtgggccagcatgcccagcccaaatgggtttcttatagtattaaagcagtagacatcccatgatttgtccaaattctcctggggaacagccccatactgagacaaggaaggctatgggaggccttatggcatactcaaactaattacacctaggtgtgatgtccactcatcgaaccctactatggggaactcacaaattctgggtacaaaacatgtatgctaacagcactcaggcctttaatacaaaatggcaacagcatacatggtggaataaacattggcccatgagatagaaaaggctctaagggagataagttcccccatcatggaacaagctgaatttattaatcctatttttatcaccttaaagtcttttatccctaacaaattttttttttttgagactgagtctcattctgtcgcccaggctggagtgcagtggctccatctcagctcactgcaacctccacctccctggttcaagcaattctcatgcctcagcctcccaagttgctgggattacaggcgtgtaccaccacacccagctaatttttgtattttagtagagacagggtttcgccatgttggccaggctggtcttgaaccttctgacctcagatgatccagctgcctcgacctcctaaagtgttgggattacaggcgtgagccaccgcacccagcctacaaatttacttttaacaaggagaagcatttagagaaaaagacatattagaggaggagggaatacttccaaactcttcctacaaagccagtattaccctgataccaaaaccaggatgaagacacatcaaaaaaaaaaaataaaactatrggccagtatcaccaatgaatattgatgcaaaaatcctcaacaaaacactagcaaaccttggctaggcatggtggcaaaaccctgtctctacaaaaaaaatgaaaaaattagctgggcgtggtggcatgcaccatgttgcttgggaggctgaggtggcaggatcgcttgagcccaggcaggcagaggttgcagagccgtgattgtgctgccgtactccagcctgggcaacagggtgagactctgtctcaaaaaaaaaaaaaaaaaaaaaaaaaaaaagattttccatgttcattatttatggattggaagaatcaatattgttaaaatgttcaaatgttcatatgggctgggcgcagtggctcatgcctgtaatcccagcactttgggaggccaaggcaggcggatcacttgaggttaggagttcgagaccagcctgaccaacatggtgaaaccccatctctactaaaaatacaaaaattagccaggcgtggtggtgcatgcctgtagtcccagctactcgggaggctgaggcaggagaattgcatgaacctgggaggcagaggttgcgccactgtgctccagcctgggtgacagagcaagactccatctcggaatgaataaataaggagctcataaaactctattaaaaaaactaacaatccaattaaatatgggcaaaagaactgaatagacattactcaaaagcagacatacattcccttaagtaagaaaagaagtaaaaaagaagacatacaaatggcaaacaagcaaatgaaaaggtgctcaatataattgatcatcagagaaatgcaaatcaaaactacaatgagatagcatttcatccctattaaaatggcttttatccaaaagccaggtcataacaaatgctggtgaggatgtgaagaaaaggaaaccctcatacactgttggtgggaatgtaaattagtacaaccactatggagaactgtttgaagtttcctcaaaaaactaaaaatagagctaccatatgatccagaaattccattgctagatatatgaccaaaagaaaagaatcaatgtattgaagagatatctgcactccsatgtttattgcagcactatggacaatagccaagatttggaagcaacctaagtgtccatcgactgatgaatggataaagaaaatgtggtacatatccacaatggagtactattcagccataaaaaggaatgagatcctgccatttgcaagaacatggatggaactggaggtcattatattaagtgaaataagccagacgcagaaagacaaacttcatatgttctcacttatttgtgggagcttaaaattaaaacaattgaactcatggagatagagagtagaatgacgattaggagaggctagaaagggtagtggtatagtggcaggagtcgcagggaggtggggatggttaatggtacaaaaaaatggaaataatgcataagacctagtatttgctagcacaacaggtgactgtagtcaaaaataatttaattgtacatttaaaaataactaaaagagtataatcagattgtttgtaacacaaaggataaatgcttgaggtggtggacaccccatgtaccctgatgtcattattacccattgcatgcctgtatcaaaatatctcatgtaattcataaatatatatacctactatgtacctccaaaaattaaaaaaaaagaacaaaacaaaacaaaagattaagtgaggggcttcaaatgtcttaaatattaaataaatgtaaggtattactttttatttaaaaaaagaaatcaatttccagttccactcccctacccagagattgggaggtcaggctgatatcacttggctcaaagccccacctctccaaacacacagtttggtctttctggcatgtccagtcctcgtcctgagtcagctagttagtataatccatctagagcctcaccatgaataccaaagacacacctatcatttgggaaattccaagagcttagaagttactacccagcaacctgggtcaaagaacagacaaactctattatacaacagtccagtccctagcctttacccgtagatcccttgtagcaaaacaattatgctttcctgagcaactgcatttgggatagcatttttataacagacaaagagataatatcaacatgaatatgccgaaaatttagaggagctaatgtggaagtagagataggagcttttagctcaattccccaatacatgtgaccctcaatattagaattataatcttgccaacaatgccagtgctttattatggtagaagtaacctgaaaaataagagtcaaaagatgttcacacattactagagtcccattgtcattaataattagtccagttcatcaccagatcatatgacaaaatgtctcccaggataaggccactcaggctggcaggttcccctttgatcctgtcagcttccagagcaggagtggtcttggcaaaatatggctttaccctttcaggcgtcaagtataattgaatgaagaggcggtatcatctttttctctgatcttctttctaagcattaatgtaatagtggacttccctcattgcatttcttattaatgcatggattcattcatttattcccagctactacacctctttctctccatttatacccaaacttttccacctttggaaaggacattgggttaggccactgtatttatccagattgtaggtagaaacacttgtcttgtaaatgcttctccttcagtccactcccattcatatagggcaggcttacataggtacagaactagtaagctatcttgagcagtaggcaatatatttgtgtttattgttagccccatttttgctagataaggtgaaggcacaacctgccccatcagacccttaggaattttcacataaaagtttaagaatatagttatatttttttgcttaggaataattcctgcttcttgcatttgtatctgcagtcctaattcagaattctagcagataaatgtaacaaagagattaaaataattgaaaagaatcaagctgaaaccctagagctgaaaaatgcaattggcatactgaagaatgcatcggagtcctttaacagccgaattgatcaagcagaagaaagaattagtgagcttgaagacaggctatttgaaaatacacaatcaggagacaagagaaaataaaaaacaaagaagcatgcctacaggatctagaaaatacaatcaaaatgcctcaaaatggcaaatctaagacttattgtacttaaagaggaggtagagaaagagatagggacagaaagtttattcaaagggataataacagagaacttcccaaacctagagaaagacatcaatatccaagaacaagaaggttatagaacaccaagcagatttaacccaaagactacctcaaggcatttaataatcaaactaaaagtcaaggacaaagaaaggatcctaaaagcagcaagagaaatgaaacaaataatatacaatggagctcagtggttcaaactggtgagaagtctggcagcagacttctcagtggaaatcttacaatccagaagagaatggcttaacatatttaaagtgctgaaggaaaaaaaaacttttacccttgaatagtatatctggtgaaaatatccttcaaccatgaaggagaaataaagactttcccagacaaacaaaagctgagggatttcatcaataccagaccagtcctacaagaaatactgaagagtatacttcgatcagaaagaataggatgttaacatgcaataagaaaccacctgggccgggcatggtggctcacgcctgtaatcccagcactttgggaggccgaggcgggatgatcacttgaggagttcgagaccaacctgaccaacatggtgaaatcctgtctctaccaaaaaatacaaaaaaattagccgggtgtggtggcacgcacttgtagtcccaggtactgaggaggctgaggtgggggaatcgcttgaaccggggaggtggaggttgcagtgagctgagatctcgcccctgcactccagcctgggcaacagagtgagacactgtctcagaaaaaaaaagaaaaaaaaagttaatgatcgctgggctcagtggctcatgcctataatcccagcactttgggaggctgaggcaggcagattacttgaggtcctgagttcaagaccagcctggccaacatggagaaaccccatctctactaaaaatacgaaaaattagctgggcgtggtggtgcatgcctgtaatcacagctactctggaggctgaggcatgagaattgcttgaacccaggaaatggaggttgtagtaagctgagatcgcacgccactgcactccagcctgggttgacagagcgagactccatctcaaaaaaaaaaaaaaaaaaaaaaagaaatcacctgaaggtacaaaactcactggtaatagtaagcacacagaaaaaacacagaatataataacactagaactgtggtgtgtaaactactcttatcctatgtatctgcagtcctgggaccactgggatttactggaaccactgaatcagctgggaaaaagaaagtttaatgtagggaaaaaagaaaatggtatagtcataccacattggaagaattgttagtcattgtctcccagcccctcttccctttaacttccagaaaagcagaagaatctatctaatagggacaaacccttgagcccccttgcgttgagtgtgagcacatacttgtgaaggcatgtaagccagcctttcataccttcatacccttattccctgctgttttagatagcacatgcttcaactgcccatcccagttctctattgaaccactcctctgaagatgaaagtgtttcttgatctgaagaaatgtaactcagtggttcaaattggtggagtatcttttgttctgacccttttacagtgtcagtattttgagcatttgcatctaccactggccatgcaaagcccagtccagaatcagtgtctactcttgtcaggacccaggtagccctccaggcctaccagcatcagtccaccttgccaggtatgtgcagggccttccctccaaggtcatcttcccacagccatgtgcggtctttctctttttggcagacagaaaagtacttactggcattttgtgcctcagcgggaaaacaggactaagtctaaattcagctcttctctgcatggctgctgccctgcaatgtccatttatttcatgaacacacgtggccacctcaggtgagcacgcagggatgtctgcttgttgccccagttccttttgatcctggaaaggggtccttctgatggacatcaacataacctgctttaatgcactcctaaaattcctgttgtgatttccatatagacaaggttcccattgtccttccgcctgaccatatggccaggccattggccactgtccaagagttagtaaaaacctaaacagtatgcaattcaacccacagagctgatttgtttttgccttctttgatcagagtaacaaccttccaaacaataggctgttcattcaccttgggactgccatccataagccaaacagctttgttggtcaatcgagagctgtcaatagggcactgtccaattggcaatagaatctaacaactctttgagtgggtccaaagtcagtcctaggggaaaagagtctctctgcttttgaatacactgagtaactgcattcccccaggagcttgttcctgatccagccatttccatttcattatggaactcttctgggccctgcccactctctgtgagcatttccccaagatattataggtatttcaggtttcaagattatcttacatccttcagtcataggggcaatttcaaataatgtctgatagcaagctaataattacctctcacatggaaattatctagtccaaagtctcagcactcgtgccaggaggtgctctaagacttttgctataaagtccagtctatgctccagagaaggctaacaatctctgtggacttgggcaatcttattggttcccatttggaatgtctaatcaatattgcttgatgagtggatttccataccttctgttttacaatactaggtagtggaaatatttcctggtcagatacaatatccatccctgtaatacattcaggtagaagagatgcaaccactccacataaaacctgttcaagcgcataccacttttttgttttgttttgttttgtttttgagatggagtttcgctcttgttgcccaagctggagtgcaatggcgagatctcagctcactgcaacctccacctcctgggttcaagtgattctcctgcctcagcctcctgagtagatgggattacaggtgcgcaccaccacacccggctaattttgtatttttagtagagacagggtttctccatgttggtcaggctggtcttgaactcctgatctcagatgatccacccacctctgcctcccaaagtgctgggattacaggcgtgagccactgcacctggctgcatttttatattctctcaatctcattgcagtgcccatcaggacttcagcaggtgtttttggtaccacagtgcaggactggaggttgtaattccactgaccagaatctaagcatggcccatcttttactttcagtttggctattagagataaaagtctatagggattgtatatttgcttttcttcttcttagtatacatttccctatgcacatgagtcaactcccccaaaagttagtgatcaatcacctctaatttccattggtaacttttacctccagtaactgattgcagcatgactgctcttcacaccatgggtgaccctgtatccactcgagaatgaaaggtttctcatcccctgccctttcaacttttcttttcccaacccatatgtttcagtgagtcagggtcattctagtaaatccacattttctgacaccaactgcaatactgcaatttaatcctggcactaaccatcgggagttagtgcagaatccacactcaggttaagggcacggtcctgagtgagacggcctcacttctgacaccagccacaagttcaggggtccccaggccacctgcacttattaccaagtggctacaaatgtaggggttcccataaccctttcagatttgataatttgctagaacaactcacaggactcagaaaagcttacggttatgcttagggctatagttttattataagaatacaagccaggatcagccaaatgaaggggtgcatggggcaaggtctaggggggccctgaatgtagagcttctgtgtcctttccccatggaaccaggacgtttcccctcctggctcatcaatgtgttcaccaaccaggacttggtatttatttgttttatttgtttgtttgttgagacagggtctcactctgtcacctaggctggagtgcagtggtgcaatctcaactcactgcaacctccacctcccaggttcaagtgattctcacgtcttagcctcctcaatagctgggattacaggcatgcaccaccacaccctgctaatttttggcatttttggtagagacagggtttcaccatgttggccaggctgctctcaaatgcctggcctcaagtgatccatccacctcggcctcccaaagtgttgggattacaggcatgagccactgtgcccagcctacttaccaggactttgaagtccagagtttttattggggtttcatgacatacgcatgattgattgaatcattgatcatgtaattgaactccatctccagccccttctcctccctgaaggttgagaagttgggctgatatcatgtggaccaaaaccccaaccctctacacacatgcttggcctttctggcacggcctgccttcatgtggagtcgtcttgttagcagaagctgtctagggacccaccataagtcacctcattaacaaaagctaccaagagcctgggaaacatggcaaaaccccatctctacaaaaaatacaaaaattagccaggcatggtggcacacacctagtcctagctattcaggaggccaaggtgggaggatcacctaagcccagagagattgaggctgcagtgagccatgactgcaccactgcactccagcctgggtgacagagtgagaccctgtctcaaaaagcaatcaggccaggtgcagtgactcatgcctgtaatcccagcactttgggaggccaaggtgggtggattgcttgaggtcaggagtttaagaccagcctggccaacatggtgaaaccccgtctctactaaaaatacaaaaattagccaggcgtggtggtgcgtgcctatagtcccagctacttgggaggctgaggcaggagaatcacttgaaccctgggggcagaggttgcattgagccaaaatgctcaccactgcactgccagcctgggcaacagagctagattgctgtctcaaaaaaaaaaaagaaagaaaaaaacaacaacaaaaaaacactaatcagggaccactattaataacagacattcctatcacttgggagattccaaggagcttagaggttactttggaggaacccaagacaaaaatgaaactaattcctcattatacaagaagtggcttatacatgaaaggattgactcagcaggtctgctgtgttcaaaccctgcacatttcagagaaaattctggcctgtgaccagccctgagagatgagatttaaattaccaaaatatgctgcctgataagtctttgtttttctggggccttgggccatgccagatatttgatgctaataatgtgatttgtggcaggggcctttggccgcccagtatcagtttgaactctggagagtgagtaactgaggtcagccacacaggtagtccacgctttcatcactgacctccaataaaaacactggacaccaagactcaggtgagcttttgtgattggcaatacttcatgcgtgctgtcacatgttattgctggaaaaatcaagtcctgtccatataaatccactgggagaggaaaaactggaagattgagattattttctcctggacttggccctagaatatttcacctttgatggctttaacatgtatcttttcactgtaagaaaccataatcaaggctgggcacggtggttcatgcctgtaatcccagcactttgggaggctgaggcaggcggatcacaaggacaagagattgagaccattcttgccaacatggcaacacctctgtctctactaaaaatacaaaaattagctgggcgtggtggcaggtgcctgtagtcccagctactggggaggctgaggcaggagaatcgcttgaacccagaaggtggaggttgcagcgagccgagattgcaccactgcactccaacctggcgacagagcgagactctgtctcaaaaaaagaaaaaaaatgaaaccataatcatggtataaccatttggaagtgttagtgaatcactggcctgaggttggtcttagggaacaccagtaaagtcatcttcccctacatttggcaaacagcctaatgcttgacaaagcactggaccacccagcctctctgaagtcctcattacaattgctcaggacaaaacctattaattatcccaggtacacttttcccctttatattccacaattgtcatgggcaagcactgtcaactctccctgtaacacacaccctctattgaaccccttgtctctgtctctagtctaaccactggaacccaagcccaaaccttgttgcctggagccccgctctccccggacctgttcccactctgccccaatcacacaggccttcgtcccaatccctgaacagtgcgtcagggcctctgcatggccctttccatgcctggactgtcctctcccagatcagctcagcaatggttcctgccacaattctgcttacacatcacctcctcagagacaccgtccctccccatcctctctaacacaccctctgctcacccacaccagcgggccctaacttctctctacttcaaactgtgcttctgttactgttttgcttctattattattattattattatttgagatagagttttgctcttgttgccccgactggagtgcaatggcatgatcttggctcactgcaacytccacmtcccragttcaagcgactctcctgcctcagcctcccgagtagctgggattacaggcgtgcgccaccatgcccggctaattttgtatttttcatagagatggggtttcaccatgttggccaggctggtctcgaactcctgacctcagatgatagctcccaccttggcctcccaaagtgctgggattacaggcatgagccaccgtgcccagctgtttttcttctattattattgttcttgcaggagctggtaaagtggctgatgtggccacagctccataaatccatgtggaacgaagggtggacatcgcctgagtccaggagacaggacagggtcactcatctctgtccctggtgatggaaactcaggctcaggaaagagccttgacctgccctgggtcacagagagaatatgagggtcagggctcaagcccaagtgctgtcttcaggcccttaggctgcctctcacacccagactaggaagctggagcagaaagtttgctagaacaatcctgagaagaggcctgcacagttcaaggggcagcttggaggaggagaggaagggagggcgggctctggccagcaggctcttggacctcaggccaggctctggcagctgcgtctggtatcaggactgcaggtcccgacagggggcggtggctcacgcttgtattcccagcacagtcgccaagcctaatgtcccttccaacggtggaaaattttggtaaaaatcaatgacaggctgggcgtggtggtgcatgcctgtgattccagctactcaggaggctgaggcacgagaatctctcgaacccgggaggtctaggctgcagtgagtggagatggtgccactgtactccatctggacgaccgagcaagactctaacaacaacaacaaaaaaaacggactgcaggtgcagtgcccagcacagagcctgctacataggaattctcattttcttctcttccctactctttccttcctttataatctcttcctttccctctgaagtaccgaccccagagcttgagatctcatcccagcctccctcttattgccatcctcccctgctgccttccccacacccctacctctcacagggtgggggtagggcctcctgggaccccagtcccagccccagcagcagtagcaggcacagctcccaggtcctccctggcatggtggctgtgactgtgactgaatgagcaagcccaggcaccttcggcttgctgggcacagcctggctcacctgcctgtccaagtcggccaaagtccagcctttgaggcgtggccacctgaggggacgtgtgcttggtctgtgtgtggcccgcttgcccctcctgctctcagggcacagtggccacctcccttgcttctactttgcctcttctatttcacagtctcagctggtgccaatggctcaggcccttccctcagagcatggtggtgggggtggggagtgggcacccaaaggccagggacacagtcgaggccacacacctgtaacctggatgccaggttccttgggtggccccaagaccaccaacctcagagagttaccatttcccttaacatttcaaatggaatggctcaagatcctgtccctggtgtggtgtgaaattcagggcctctcactgttatctgcaagagatacagcggaagcacaggacagtagaaccattctgtctggggaggactaagggagacccacaatagtgtgtcatttgtaatgagtctttttttttttttttttgagactgagtctcactctgtcgctaggctggagtgcagtggcgtgatctcagctcactgccacctccgcctcccgggttcaagcaattctcctgcctcagcatcctgaatagctgggactacaggtgcccgccaccacgcccagctaatttttgtatttttagtagagacggggtttcactgtgttggccaggatggtctcaatctcttgacctcatgatctgctcgccttggcctcccaaagtgctgggattacaggcgtgagccactgcgccagtcctaatgagtcttgatgaccgcataggagtttgccaagggaaatgggctggagaccactacaatgtatgcagagcatgtgaagagaagagcaaacccctcagcctagctgcagagaacttggtgttcatgcagggaagggttttgagatagactggaggaacatgttggcaccagtctggaaatggtctttgccaagccaaggaatgtaattccttgtaattccccaaagtggaaccagcagagaagtttgtgagcttaagaagcagattcaggctgggtgcagtggctcatgcctgtaatcccaccactttgggaggccgaggcgggtggatcacctgaggtcaggagttcaagaccagcctggccaacatggtgaaaccccgtctctacaaaaatacaaaaattagctgggcatgatggcgggtacctgtaatcccagctcctcaggaggctgaggtgggagaatcgcttgaactcgggagacagaggttgtagtgagccgagatcatgccactgcactccagcctgggcgacagagtaagtctctgtctcaaaaaaaaaaaaaaaaaaaaaaaaagcagattcggttactttaggaggctcatcccctcaacatatggaaggtgagctgaagggacaggggacagggggtgggcaaggcacatggagtttaatgataggcatgacctctcctgaaggacttaggtttgcagttaaggatgtcagttgtggcacctgagcagtgtttactgctattaaaaagaaaaaccttagacaaattaaatttaaccatttattcaagcaaagaaatgactcatgaatcaggcaccactctgaactagtaaaggttcagatagctccacccagtaatgtgggcagctggcattgttttttttgtttgctttgttttttgagacagggtctcgctctgttgcccaggctggcatgcagtggctccatcacagctcactgcagccttgatctctcaggtttaagggattctcccacctcagcctcctgagcagctgggaccacaggcacatgccaccacgcccaactaatttttaaattaaaaataatttttttttttttagagattgggtctccctatgttgtccaggctggtgtggaactcctgagctcaagcaatcctcctgcctcatcctcccaatgtattgggattacaggtgtgagccaccatgcctggtcaacaatttttaagtgtacaattcaatttccttttattacattcacaatgctgtgcaaccacccttgcattctttggataaatctcacttggtcatgatgtctaatccttttaataaactgttggttttggcttgcgagtatttttttgaggaattttgcatcaatatgtatagagcatatttgactgtaattttctttccttgttttgttttgtttttttttttttttggacacatagtcttgctccatcacccagcaggctggaatacagtggcatgaacacagctcaccacaacctcgacttcctggggctcaagtggtcatctggcctcaaccttctgagtagccaggactacaggtgcatgccaccacgcctgggtaatttttaaatttttttgtagagactacatctgactgtgtcgcccaggctggtcttgaactcctggcctcaagtgatcctcccgccttggcctcccaaagtgtttctccccaagtgtgagccaccatgcccagccctcttgtgatgtctttatctggttttaatatcagggtaatgttagcctcatagcatgagttaggaaatatgcccctcttctatttgtggaagtgtttgagaaggattgttaattctttaaatgtttggtagaatttaccaatgaagccatctggtcctggaccgtattaggcagaaacaatacatatatgggggatgggggtagagagagagagtttgagaggtagctggcaagtccaaaatctctagggtaggctggcaggctggagaaacagggaagaagctgcagttcaagtctgaaggcagcatgctgagagaattccttcttcttctggggaggtcagtctttttcaaattaaagtcttcaactgattggataaggcccatccaagttagggagggtaacctgctttactcaaagtctacaaatttaaatgttattttcatctaaaaaatatcttcacagaaacatctagaataatgcttgaccaactatctggatacctttgcctagccatgttgacacataaaattaaacatcttttttttttttttttgagatggagtctcgctgtgttgcccaggctggagtgcagtggcatgatcttggctcactgcaacctctgcctcctaggtttaagcgattctcctgcctcagcctcgtgaatagctgggattacaggcgcccaccaccacacccagctactttttgtatttttagtagagatgggttttcaccgtgttagccaggctggtctcgaactcctggcctcaggtgatccacccgccttggcctcccaaagtgctaggattacaggcatgagccaacgtgcccagccaatgttctttaaaaaaacacatgactctacagtgattgtactaacttacattctcaccaacagtatatgagggttccttttctccacatcctcaccagcatttgttattgcctgtcttttggataaaagccattttaaccrtagtgagataatatctcattgtagttctgatttgcatgtctctgatgatcagttatgtagcgcaccttttcatatacctgtttgcgacttgtatgtcttcttttaagcaaggtttatagtgattcagatcttctgcccattatgcagactggctttgttctgggggaacacctcattatattgcgcaggctggtctcaaactcctgggctcaagcaatcctcccaccttggcctctcaaagtgctaggattacaggtatgagccaccatgcccagccagtagtgttttttttttttttttttgaracgaagtcttgctctatcacccaggctggagtgcaatggcatgatcttggctcactgcaacctccgcctcctggattcgagtgattctcctgcctcagcctcctgagtaactgggactacaggcgcccaccaccacacccggctaatttttgtatttttagtagagatggggtttcaccatattggccaggctgttcttgaactcctgacctcatgatccacccacctcagcctcccaaagttctgggattaccggcatgagccaccacgcccggcctccagcagttctttttttagtattatatgtttacaactaaccaagtctactcaaataacactacatttcatggtagtgcaagtaccttatgataacaaagtagtcttaacttctccctcctgtcccttctatcattgctgtcattcagttcccttatccataaactagaatcgttgaatacacagttgctattacagattgagcaccccaaatctgataacccaaaatctgaaatgctccaaaatccaaaacttgttgagtacagacataatgatcaaaggaaatgctcactgaagcatttcagattttggatgatcagatttgggattttgaaccagtaagtatattgcaaatatttcaaaattcaaaaaaaaaaaatccaaaatccaaaattctcctggtatcaagcattttggataaatgccctgttttattttgaacaaaccattatctgttagattaactaaggataagaaaagtaaaagcttttattttaccttcacttattccttctctaaagctcttcccttgtttatgtagttcaaagtttctaacttatatcatctttcttttctctgaagaagtttttttttttttaaatacttcttgcaagacaggtctacagattctctcaatttttgttggcttgtgaaagttctcatttctccatcactttttttttcctttttttctttttcttttctttcttttcttttctttttttttttttttttttaagacagattcttgctctgttgcccaggctggagtgcagtggtgctatctcggctcactgcaatctccgcctctcaggttccagtgatcctccagcctcagccccccaaagtagctgggaccacaggcatgtgccaccactaaagtttgtattttttttgtagagacggggtttcaycatgttgcctaggctggtcccaaactcctgagctcaaagccatctgcctgcctcggcctcccaaagggctgggattacaggcatgagccactgtgctggcctctccatcacttttgaaggatggttttgcaggaaagagattctagggattataggttggtggggtcttcttctctgtcaatgctttaaatatctcacatggctctcttcttccttgcatggtttctaagaagtctggtgttatttttatccttggtcctccataggtaaggttttttttactcctctgccctcttccaagactttttatctttgaatttctgcaatttgaatataatatgcctaggtgttgattttttcttctttttggggggcatctgtcttccttagtattttctgagcttcctggatctgtggtttggtgtctgatacaaatttggggaaattctcattcattattgtttcaaatgtatcttcagttccctctttcttgctctgtattcccattaatgcatatgtgatgacttttgtcattgtcccacagttttggatattctgttctgtctgtttcagtcttgcctctctttgcttttgagttttggaagtttctattgacatatcctcaagttcatggattctttcctcagctttgtccagtctactaaagagctgatcaaaggcacttcctttgtgtttttttctcctcattgtacttcttctttgtttttttcttagaattttcatccctctgcttaaattacttatctgttcttgcatgttgtctactttttccatgagcacccttggcatgttaatcatagttgtttcaaatttccggcctgataattccaacatccccgctatagttgagtctggttctgttactcgctctgtcgcttcaagtggtattttctgccttttagtaagacttctagttttttcttgaaaccaaaccagtactgggtaaaagaaacccagtgtggaggtgtctactctggtaagttgtgactctctggatctgcctgtctgtctccagttttggaggcagctctgtgaccttaatttgctctgtgaccttaattctctgacagatctaagaagagttgcgggtgttgtttattcagctttttactgttgttaagatggagtgacagttgccacactccttacaccctaagccagaaacaagaaacccccatttagttctttttttttttttttaatttgagagtctcactctgtcgcccaggctggagtgcaatggcacaatctcggctcactgcaacctctgcctcctggattcaagcaattctcctgcctcagcctccccagtagctgggattacaggcatgccccaccacgcccagctaatttttgtatttttagtacagacagggtttcaccatgttggccaggctggtctcgaactcctgacttcaggtggtcctcccactttggcctcccaaagtgctgggattacaggcatgagccaccgtgcctggccggttctctttgtattttctttttcttttattttctagagacagagttttcctctgtcacccatgcaggagtgcagtggctcaatgacagctccttgcaaccttgaactcctgggctcaaacaatccttccacctcatcctcccaaatagctgggactacaggcatgtgccataatgcctggctaattttaaaaattacagctcactatgttgcccaggctggccctgaaatcctgtcctcaagtgatcctcttgccttggcctctcgaagcactgggattacaggtgtgagccatcacacccagcccttttttaatttttatttttttattattatgatttttgagacaggatcttgctctgttgcccaggctggaatgcagtggcacaatcacagctcactgcagcctccacctcctgggcttaagcaatctcacctcagcgtcctgagtagctgggactacaggtgtgcaccaccacacctggctaattttttatttttgtagagatggggtctcactatgttgccttggctggttttgaactcctgggctcaagtgatttgcctgcctcagcctaccaaatgttgggaccacmggggtgagccactataccccctggccctttttaatactttccatctgtttattgataccctttctttagtatatagtggtcactttttttttctgagatggagtctcgctctgttgcccaggctggagtgcagcagtgcaatattgggtcgctgcaacctccacctcctgggttcaagcgattctcctgcctcagcctcccgagtagctgggattacaggcgcccgccaccacacccagctaatttttgtatttttagtagaagacagggtttcattatgttggccaggctggtctcgaactcctgacctcaggtgatccacccatctcagcctcccaaagtgctgggattacaggtgtgagccaccgtgcccagcctagtggtcactcctataagacaatttctcttgcctggttgtgtgtgtgtgtgtcatacttttctgtttttttgtgtgtgtctcgtaattttttgtaggaaaacaaacattttagataacatattgtagcaatgctgggtactggctgcctcaccacactctacccagagcgtgctattgttcatttgtgtatttggggagcaactggctgaattatggtcctggtctatttcccaccctctgtgttaagcccatgaggttgctcctcggggagacacagctttggggatggctacagccactctggggtgacagtggtcttggcagggctcccttcctctctttccctgagcacatccagcagttaaactccactaattgccagctgattttacaattgttttaatgatgccctgggggataaatagatcagagacaatccattcaaattcagactcctttgaaggaataatatcaggggcagaaataaattatacatatttcttcgggccccacctcccctgctctccttcccagcattgagcccttggttgcctkggcccagrctrrggttttcagtatttgtaaagccttcagactaaggaagtgagtggaaggctggaggtgtggggcttggcgctggggcacttggggtaggagggataggtcttccccccagagcaggatttccaccctattgaaggttccaggagggagctaggcccctacccatgccctccaggtcatgaccctgccccccacctcactctgatcagaggacaggctgggaggtaggagggcatgaagaggcaggggaagacaggaactggtgcagaggtttaatgggacaggagctggggccaggtgaggaggggagggctgtcactgtggcagaaggctgagcaggaggctgggaaaaagggtggccgccagacagtggggctccaagaaagccagctgggcccctaaggtcagccggtcaccacagcagtccagtagcatcaggaccacgccattcatccagccaaagccctcctgggagaggcagggcagtggggccaggtttctggggaagccccaaacccttggtggtgtgtccggaattggtgggttcttggtctcactgacttcaagaatgaagccacggaccctcacggtgagtgttacagttcttaaagcagcacgtctggagttgttcgttcctcccggtgggctcgtggtttcgctggcttcaggagtgaagctgcagatcttcgtggtgagtgttacagctcataaaagcagtgtggacacaaaaagtgagcagtagcaagatttattgcaaagagcaaaagaacaaagcttccacagtgtggaagaggacgtcagcagattgccgctggtggttcgggcagcctgcttttattctcttatctggccccacccacatcctgctgattggtagagcccagtggtctgttttgacagggcgctgattggtgcatttataatccctgcgctagatacaaaggttctccacttccccatcagattagttagatacagagtatggacaggaaggttctcmaaggccccaccagagcagctagatacagagtgtcgattggtgcactcacaaaccctgagctaaacacagggtgctgattggtgtgtttacaaaccttgagctagatacagagtgccgattggtgtatttacaatccctgagctagacataaaggttccccacgtctccaccagacccaggagtccagctggcttcacccagtggattccgcaccccggctgcaggtagagttgcctgccagtcccgtgccgtgcgctcgcactcctcagcccttgggtggtcgatgggactgggcaccgtggagcgggggcagtgctccttggggaggctcgggctgcacaggagcccagggaggcgggggaaggctcaggcatggcgggctgcagtcccgaggcctgccctgggggaaggcagctaagacccggtgacaaatcgagcgtagcgccagtgggcctgcactgctgggggacccagtacaccctccgcagccgctggcccgggtgctaagtccttcattgcccggggccagcagggccggtcggctgctcctagtgcgggcccgccaagcccacgccaacccggaactccacctggcccgcaagcgccgcgcgcagccccggttcccgctctcgcctctccctccacatctctctgcaagctgaaggagtgggctcctgccttggccagcccagaaaggggctcgcacagtgcagcggtgggctgaagggctcctcaagtgccgccaaagtgggagtccaggcagaggaggcgccaaaagcgagcaagggctgtgaggactgccagcacgctgtcacctctcagtgggggctgtgggctctcttcccaggggcactggccctgcctaaccctagcggtacagggagcaccagtcagctcctcctccaggcccacatgcaggtgagcacactgaggcctggggcggggatcgtgggcagcagagcccaggagtttcctgtagggtgatggccagcccacccctggcctgctcacctgaacttcatactcccctccgccaccgggctctccaccgttgctaatgtcatactgggaataagagggcgggccgtaggtcaggcactgcccccaccccacccacccccagccacagggacaacaaacaacgggatccttgtcgggagaagccgctctgcctcccagcagcccctgcagtgcccaggagtgcccactgggcgccgccaccatcccagctgcgcttgccctgagccctgccaagcctgaccctcccgcctcaccacggggacgccctgggggtacggggagggctcaggccagctcatcttctcatacatggctgacttgctggtagacatcaaagttggttcggatccaattctggggcatattggtagatcaggatctggctgccctagaaggttccagacattcccgtgactgtgggtggggctggactgggagccaggacgctgggcccggcgggaagccagatgtccctttcctggcccttctcttctcggctcacagctgccccccggtggctccgcgggacctgccggctgggacaaggggcacagccggaggaagcggcctcccctgcaggtcctgctcagggtcgggagggggcagtgctgcctgcagtgggccagagccaccttctgtgccctcacctccaggtatttcagagccttgtccgccacgccagggtcagagaaacacccgttccagagtggagtgaggttggatgggtaaaactcccggttctccttgttctcaaggtcgtagtcgaaccaggcactggtctgctcatcccacaggactgtgttcagggcggccaagcgctgcgccggcaggattctgtactttgtggcctgggagtcgttccctggggcagtgctgcctttgggccctacaggagccctctagaaagaacttctgaggtcagacgggcagcatctactctaacgcctcacctcctccaggaagtctccccaccctccccaggaaaccccagcctgtcctgtctcctctgggctgcctgcactgtctctggcaccactgggtagatgttcactgcctgctgggctctccttccctgagctcctgggccaggcctccgtctcaggaggaatcagggctactgcttgctcagccccgtcctgagctactttgctcatccacatcccctcatctggggaaagggtttggggttttatcccgtccctagtcctaccactggagcccaagcccagaccctcttgcttggagccccgctttccctggacctgttcccactctgccccagtcacacaggccttcttcccaatccctgaacagtgcctcagggcctctgcacggccctttccgtgcctggactgtcctctcccagatcagctcagcaatggttcctgccacaattctgctcacacatcacskcctcagagacaccttccctccccatcctctctaacacaccctccgctcacccacaccagcgggccctaacttctctctacttcaaaccgtgcttctgttactgttttgcttctattattattattattattggagacagagtttctctcttgttgcccagactggagtgcaatggcgcgatcttggctcactgcaacctccacatcccaagttcaagcgactctcctgcctcagcctcccgagtagctgggattacaggcgtgcgccaccatgcccggctaattttgtatttttcatagagatggggtttcaccatgttggccaggctggtctcgaactcctgacctcagatgatagctcccaccttggcctcccaaagtgctgggattacaggcatgagccaccgtgcccagctgtttttcttctattattattgttcttgcaggagctggtaaagtggctgatgtggccacagctccataaatccatgtggaacgaagggtggacatcgcctgagtccaggagacaggacagggtcactcatctctgtccctggtgatggaaactcaggctcaggaaagagccttgacctgccctgggtcacagagagaatattagggtcagggcttgagcccgggtgctgtggtcaggcccttaggccgcctctcacacccagactaggaagctggagcagaaagtttgctagaacaatcctgagaagaggcctgcacagttcaaggggcagcttggaggaggagagggagggaggaccggctctggccagtgggctcttggacctcaggccaggctctggcagctgcatctggtatcaggcctgcaggtccagtgcctattatggggcctattatgactgcacaaggggcctcaagttcattcaggccaagcctctcattctgcagagaaccacacagtggttgccgggatttgcccaaggctggtgggttggtcatgagggcaggcccgaactcatctctattttcttgcattccggctctcctgatgttccaggcccatctctgagtcatccttggacaggagagatcccagagggtaaacaggacatgagcctgcagtgaggggagacagaggaggagagaactccctgaaacaagaggagaggaggagctggtggggaggacacaggtagggcagcgggcagaccaccaaggggcaggcttgctgtttcgcagcctgacccccagcctgtgtgcctcattgccgcctcctcctcccagagcagggcctacgcctcaaccagagcttggagcaagacaaggaaggctccatttctctcctcctactcctctactcaaaccacagccatctgtacatcagaaacttttttttttttttttttagccctcagctgcctgatgcccatggttggggtttgggctgagtcaccragggctgcctgcacacaccagggagggctcctgagcacccactctcaggctttgcacgtttccgaaattctgcacacgacagcaatttttgcagcaagggtgtggagggtgcctgtgggccagtcaccagcctgctgcagctgtccgtggttgcctctgtctgccagggctgcacgacctctggttttcacctcaaccactgcggcttcctctctccccgtgggaacagggcatggggtgagggagctaccatgcccagacaactaggcatctccctgccaggccaggagttccactgccacagcccaataccagcaaattcagatgcaaccaagtgaccccaactcaagttacattccctttctcccccacaggctctgcagtcccagggattcgcagtgttagttgatctccggggacactagttcccaagagaccccactgaaggcctggctgtaccatcataggctgtgtgcccttgggcaagaacctctaccattcctcgttgcctgtatataaattgaaggctttgctctaggtcagtgttgcaaactcaaattccagtaataggaatgtgcaaaatatgttggggataagggagccaacagtgcaagggggaagtgagtgttggggacctagtcttggggtgacgggaactgggctgaaccggaagcgtattcctgtgtaagggaggccactgctcagagggtggctgctatggggctgggggatcctgatttgtcaaaggaaggtggaaatttatatttcagctcacacgctcctgtttttaaaatgtctcaatgtctctaattctgactgtaaatctaagagtgattcctgtgtgggtacggttaggaggagtctgacctccaccaaaggggctttgtgggcygggacttcgtactcctgcagagcgcaggaccgcacccctgaatgcaacctcagcctggaatgttgacacaatcatttggtgtccctttaaattggtatcctatgtacatattggtatctgtaatatgtagagatctcttacaagtctaaaaggaagatagggctgggcacagtggctcatgcctgtaatcccagcactttgggaggccgaggcaggcggatcacctgaagtcagaagtttgagaccagcctgaccaatatggtgaagccctagcccataaggacgcagctctgggctgccctcggggttgcgtgtacctgagtccccacccacatctcaccacttagcttgtctgcccagtctttcttaacacatttacaagcagatacatcattggtgggaaaacagaacactttaaaatatgggttcagctttgatttcaaggagaagctgcaagctgtgtgaagggctgggaagggcaccacaggagacgcagctcagcctcttcttcgtcctcagcaactcagctctgaccccaagtttcaccccatgcagcaagggctctgagccctcctgggcccaccatccttagaaagcagcttaggggagggaagtcttattgtccccactgcaaattatttctttgaggaaaagctactagtttccttctcaatgcctgttctcagggtatcagcgtgaccagctttgtttaagttgattttccaggctcccctacagttcagggtggccagggacccagttctggcaaatgagacataagtggacgtcactgcaaaaggatctgaggcaggctcctaaaaggggagagactcaaccggctctgcgttgagtcctttgccctccctcttcctgccttgatgcagatgaaaggcttggcactgcagcagccaccttgtatccacgaggcagtaaacctcagccgacagccacctgcttcagatggcagcccaggaaggtgaaaagagactgggttctcgatggcaacttcgagtcacgacagccttagacttctgtgatatgaaaaaacaaccctcatagttgtttaagcctctggttttcagatttctgtcacagctgaagggaatctcaagcagatccttcctctgagcatctgctctcttctcaaggggccttccggtcacatgctttccttcattcccattacatttccgtccaggttctaatgtcctagggatattgtagcacgcctctgcctggcctaacttcaacctccctctggatgtgagaggcagacctcactgtaggaagagggtgaaggaagggtgtcgaataatgcataaggaaccaaggactaatatccatatatacagacccaaacatcaggtgacactgagcgtgtgcatccacagcttctcacacctgccttgtctggtagacaccagctctggatccccagacctctcacctgagctctagggcaaacgcttcccracatcccccgtggcgggcagcgaggccgggatggtgtggagctgcgcacttccagcttctgggatgcaaggccctgtcaccactcgatttccaggtgtctgcttcacagtgatctgttaaactgccatatgtgttttatgcaccttcctgggttgtgctacagctgataataaaatcatttgagaattttgtgttgttgttgtttgagacagagtctcgccctgtctcccaggctggagtacagtggcgtgatctgggctcactgcaacctccacctcccgggttcaagcgattctcctgcctcagcctcccgagtagctgggactataggcatgcgccatgacacccggctaatttctgtatttttagtagagatggcgtttcaccatgttggccaggctggtcttgaactcctgamcacaggtgatccacccaccttggcctcccaaagtgctgggattacaggtgtgagccaccgcgcccggacatttttgagaatttttaaaaagagtctatcagaaccgagctcggtggcttatatctgtactcccagcactttaggaggcctacctaggtgggtggatcatctgaggtcaggagtttgaaaccatcttggccaacatggtgaaaccccgtctctactaaaaatacaaaaattagccggctgtggtggcgggtgcctgtagtcccagctactggggaggttgaggcaacagagcgagactctgtcttaaaaaaaaaaaaaaagttcaccaccatgcttggtttggccccatttggacgggaggggagagcagtgaagcagccggcacgtgaggtggcctcccggggcagcagagctggcagggcagggcgggccaggccggagggctctgactgatccttggagctctaataggaagctgcacacccattcactctcttagaatagctgtgcacctgcagataaccagtttctgttgtggtgagtggtagttaaataaataaataagcaggcaaagaacaggcttgtccttactgtgacagtcatttgctgctgtgaaactactatggtctaacacctcccactcactttcctcaatcagtgctgcctgcaatggcaggaactcggggccaaaagagcacctgccctagctcagagctcgggcctgcccaccccaccaccccaccccctgggaccacctgactttgacctctgagaccacatttggcttgcatgcaggcaagttatatgacttctctgagcctcagtttcttctttggcaaagtggggatagtaacagctctcttcaaaagccattgtaagagttggaaatgataagccgggcgcggtggctcatacctgtaatcccagcagtttgggaggccaaggcgtgtggatcacctgacctcaggagtttcaagaccaacctgaccaacatggtgaaaccccgtctctactaaaaatacaaaactagccagcayggtggcttatgcctgtaatcccagcattttgggaggctgaggtgggtggatcacctgacctcaggagttctgagaccagcctgaccaacatggtgaaaccccgtctctactaaaaatacaaaattagcagggcatggtggcacatgcctgtaatcccagctatttgggaggctgaggcaggagaattgcttgaacctgggaggtggaggttgtagtgagctgagatcacgccattgcactctagcctggggaataagagtgaaactccatctcaaaaaaaagaaaaaaggtcggaaatgatgtattttagccgcgcagatagtcagccatacgcctgtttcacttatgggtagaaacactgcagttgacttcatttcagcagctgaggggcccagaggactgtgtcctctgcctcactgtgcaggcctcagtcatgttcctggcaaatattccagaaggctcagaggaggcgtgttgagagtgttgtcagccaatcaccacaaagctgctccttcaggagccttctcactctgaacctcacataacacaagcctgtggctggagggagggtggcaggggcctacctgggcattacttccacgcttgcagcctcagggtaaccctggtggtcagataagcaaagatcagcctcaaagcagcaaataggaccatgtcctctggggccttaccatggtccgcatgcagtccaggcttggcttcaccatttgcatgagagctcagaggacacccatggccacagaggcttagctcagccaggggaatggagacagtcagtaacatggaggtgagatcatagcaaacaccttcatctccggttcaagggggaaggggtcacctgctggggaaggaggaggctctggcaggtgacgctgagctggaacgtcgaccaccttcctcacggccttggcagtgaattccagatgcccagacctctgcaaacaacttccagcaaatgcagcgaggacagcagggcacctactgttgactcaaaaagacacttccaggtttccccagaaaaggcagcctttgctgctgcagcccctgcggatgacggcttgtttaatagctcagattccccaggcagtttctccaccctccgctgctgggattcttgcaatggcgatgtggtgggtcggcctggagagggtgggtcaggaaggatcttctgacttggagacttccaggggagacaacaccacacacaaggccctgctccagacttggcaaggatgatgccaaatacgcggaggcagctgcaggaggagcttgttcccaggataaagaggtggtcagctggccaggtacagtggctcatgcctgtaatcccagcactttaggaggctgaggtgggcggatcacctgaggttgggagttcgagaccagcctgcctaacatggagaaaccctgtctctactaaaaatacaaacaattagctgggcgtggtggcaggcgcctgtaatcccagctactcaggaggctgaggcaggagaatcacttgaacccgggaggtggaggttgcagtgacccgatacggtgccattgcacttcagcctgggcaacaagagcgaaactccgtctcaaaaaaaaaaaaaagaaagaaaaacaagctgggtgcaatggctcacgtctgtaatcccagcactttgggaggccaaggcaggtggatcacctgaggtcggaagttcgagaccagcctgaccaacatggagaaaccctgtctctactaaaaatacaaaattagccaggcgtaatggcgcatgcctgtaatcacagctacttgggaggctgaggcaggagaattgcttgaacgcaggaggcggaggttgcggtgagcagaggtcatgccattgcgctccagcctgggcaacaacagtgaaactccacctcaaaaagaaaaagaaaagaaaagtctacagtataatggtaagaaatgtaagcgtgtcagattctgtttttagaacggaagcataacagatccaccgaaagcatcctgtgtttggtgttccctttcctacctgggttcctcgcccacccaggcatgactgcgctcctgaatgtatggtgtatcagtcccctgcatgcttttatacctctgctgttcatgcgtggatctgctagggttgcttggcatgtttttttgttgtggtaaaatatacatggcataaaattttctatcttaaccacttttaagtgtacatttcagggacattaagaacattcactttttttttttttttttttggaaacagagtcttgctctgtcaaccaggctgaagtscagtgacgcaatcttgactcattgcaacctcggcctcccaggttcaagtgattctcctgcctcagccttctgagtagctgggattacaggtgcctgctaccacgcccacctaatttttgtatttttagtagagatggggtttcaccatgttggccaggctggtctcgaactcctgacctcaggtgatctgtccaccttggcctccaaaagtgttgggattacaggcgtgagccaccgcacctagccctttttgtttctcttcacttttgtcctactcctgtcaaatttttctttttttttttttgagacagagtctcgctttgtcgcccaggctggagtgcagtggcgcaatcttggctcactgcaacctctacctcctgggttcaagcagttctcctgcctcagcctccccagtagctgggattacaggtgcctgccaccatacccggctaatttttgtatttttagtagaaacagggttttgctatgttggccaggctggtctcgagctcctgatctcaggtagtctgcccccctcagcctccaaaagtgctaggattaccagtgtgagccaccgcacccggcctcaaatttattgattctcttactgctcgaacccaggaggtggaggttgcagtgagccaagattgtgccactgcactccagcctgggtgacagagcgagactcagtctcaagaaaaaaaaatgtattgagtctcttttattactttttctagttttatttctttatttgtttattgttcatacatttgtttgtttgtttgtttgggcttggaagtgatggatttcattcctagtctctcatgcttccctccatccacatttttcacatgcgcactgaattacagaatctaaagctaatcagaaattgtcccctgcaggaggaaaggcactctttagctctgatcacaccttctgtcttacagactgtcactcggcatcacaggctgactttgttttcatgcctccaaccaatcatcgtcattgctgctgtggttcccaccatcagtgcttctgtggacttacccacatgtttaccagtttctttgctcttcattgctttcattgccctctcactccttttgaggtcaatttcctttctcttaacaaaaatgtattagcagctctcttgctgatggtactttaggataaactctttcaaaagtcttcctctgaaaagaccttgttttaatttttaaattttgttttgttttagaaaattttcatgtggagcctcccattgatgaaaaaatctccatttcacttttactcgttgtggtgcattatcaacaaagatggccaccaacagttttgttcatccctgtaatgtcactcctcccatcaagaagtggaatgtggccgggcgcagtggctcacacctgtaatcacaccactttgggaggccaaagtcggcagatcacatgaggtcaggaatttgagagcagcctagtcaacatggtgaaaccccatctctactgcaaatgcaaaaattagctgggctactcagaaggctgaggcaggagaattgcttgaactcgggaggcggaggttgcagtgagctaagattgcaccactgcactccagtctagctgacagagctagtctcctctcagaaaaaaaaaaaaaaaaagaagtgaaatttatttcctttcgcccctccccttaaatctgggccagccttgtgactcactttgactagtagaaggtggaagtgatattatgccaggtccagacttaggccttaggaggcctggcagtttccattttcaccctcttgggatccagccactatgaaaccaagttcacctgctttattggagagagaaatgacctagaagatgaaagacagcaaagggagagcaggatgcccagccagccaccagccattctgaccccttcagctgaggcactgcatgggtgagtgaagctgtgggatctcacagtcccagttgagccacctcagccaaaacatcacataagaacacagatgagccgtcccaactgagccctgccaaactacagaattgtgagcaaataaatggtggtgggtttttatttatttatttatttatttatttatttatttatttgagacatggtcttgctttgttgcccagactggagtgcaatggtgtgaccacagctcgctgtagccttgacctcccaggctcaagtgatcctcctgcctcagcctcctgagtagctgggactacagtcatgtgccaccacatctagctaattttatacatttttttatagagatggggttacactgtattggccaggctggtcttgaactcctgggctcaaggaatcttcctgcctcagcctcccaaagtgctgggattatagacatgagccactgtgcctggctggtggtggttgttttaagtcactaaattttaaagttatttgttatggagcaataggtaaccaaaacactcctgaatggaattttgacatggggaggggggtggaattctaggatgagttattccttgtcagcactttgaatttgtttttatttatttatttatttttttgagacagagtcttgctctgtcgcccaggctggagtgcagtggcgcaatctcagctcactgcaagctctgcctcctgggttcacgccattctcctgcctcagcctcccgagtagctgggactacaggcgcccaccaccacgcccagctaattttttgtatttttagtagagacggggtttcaccatgttagccaggatggtctcgatctcctgaccttgtgatctgcccgcctcggcctccagaagtgctgggattaccggtgtgagccaccacgcccggcagcactttaaatttagaattccactgatctctgtcttcttttgctttgcaggtaatctttcaggttttttatttttgtttatttattttttgagatggagtctcactctgttgcccaggctggagtgcattggcacaatctctgctcactgcaaccttcacctcccggggtcaagccattctcctgcctcagcctcccaagtagctgggactctaggcatgcgccaccatgcctggattatttttgtatttttagtagagacagggtttcaccatgttggccaggctggtcttgaactcctgacctcaagtgatccgcccacctcagcctcccaaagtgctgggattacaggcatgagccaccatgtctggcccctcaggttattttttaaatcatctctttgtcttcagtgttattcggtttctctaaaatgtatttaacatagtcttatttattctgctccagaattgttgtgctgctatacctccgccttcttttcctcttttctttcttttttaatttttatttttgtagaggcagtgtctcactttgttgcccagggcggtcttgaactcctgggctcaagagctcctcctgcccaaagtgttgagattatagggataagccaccactcctggccccctcctttttttcctggaaatttttttggtgcttatgatgtgcagtaataaaaatacgattttaagtgttggggattaaatagtgaacaaaaaagagaaagtcactatcctcatgatagtgatattttattttattttatttacattcacagtgcttggttcacagcacatatgctaaaactggaacaatacagagaagattagcacggccccagcacaaagatgatgtgcaaattcatgaagtgttccatattaaaaaaataaaataaaaatagcaatacatttacattttattttatagcgacagggtctcactatgtttcccaggctggttttgaactcctgacttcaagcgatcctcccgcatgagccaccatgcctggcctaagcttacattttagttagagaaagagcctgggaatgaagctagcatggagaagagcagagctgagatttaaagggagcagatcctgaagcctggttgaaagctgcatcgtttcccacctgaattcaaccacattcattttcagtaacacgagcagtaactgcttcttgttgtttaagccaatttaaatatatttctatgtcaattacaaatgaaagggtattaactgttaggtgcccagcctcagcctaatctagatgttctttctctgcaactttgtatcttcacttaattagtttacttgaaaattaattaaattaggcctggtgcagtggctcatgcttgtaatcccagcactttgggaggccgcggcgggcggatcatgaggtcaggagatccagaccatcctggctaacatggtgaaaacacgtctctactaaaaatacaaaaaattagcccggtgtggtggcatgcgcctgtagtcccagctactggagaggctgaggcaggagaagcacttgagcccaggaggcagaggttgtggtgagccgagatctcgccactgcactccagcctggcgacagagcaatactccatctcaaaaaataartaaataaaataaataaataaawaaaaacactgacacagtggggatgaagtttcaatgtaaattgcagagaggacaacattcaaaccatggtacctagtcatagtattttactcttttcttatgcttttaattcctgaagtatctagactttctaatcctattttataatacctttgtagtccttatataacatctgtgttttggtatttgtttcaggttttttcctaagtatgtgtcaagatcccattttccaagtcaaaaatgggattttgctacacattatttcataacctgctctttgtttttcacatgataaggaacttaaaacaacacacatctttttctgagggcagaaatttgggcccagctcacctaggttctccgcttcagagctttaccaggctgctgtccgggtgytggctggggctatggtctcatctgaggctcagctggtctcatctaaggcttaatattggcccccaagctccctcagactgttggcagaattcttctccttatggttgtaagactagaactggggttcatgttttcttgttggctgtcagccagggatggcccttagcaactagagactacagtagttccttgttgagtggccctgtcaccacagagaagcttacttcttcaaagccagtaatagacggagagtctctgaccctctgagagggcccagacactctttcaaagacttccacctgatttagtcaggcccacccatgaaaatgcccccttgacttcaaaatcaactgacttaggaccytaattatgtctgcaaaaccccctcacctttttcacagtctattagctggaagtaagttgcaggtcctaccggcgctccaggggaggaggttacacagggtgtgaacaccagggagtgggaccacagggcccatccctgggtctattcataccatgtttacctttccatgtcagtatcttttcttttcttggtttttttttttttttttttttttcagatggagtctcactttgctggcccaggctggagtgccgtggccccatcctggctcactgcaacctctgcctcccaggttcaagtgattctcctgcctcagcctcctgagtagctgggacyacaggcatgtaccaccacacctggctaatttttgtatttttaatagagatggggtttcgccacgttggccaggctggtcttgaactcctgacctgcaggtgatactgcccgcctaggcctcccaaagtgctgggatttacaggcacgagccaccgtgcacggctgttaytatgttttctaccaccttctaatgttaatggcctcacagcattctactatgtggatgtgtcaacatttatttaattatttatttatcactaagcactgaataaacataaacattttagtttattcctttttttcttacagacagcgctggggagaatgaacgcctgagtactcatgtctttatgcactgtagtattatttccttacaacagactcctgaacctggaacggcagtgtcaaaggrttcacaaaatgttagacttctgaagcaaatcagatggcaccttttttgaataatgaagartctttacccctggcatgaggagctgaggacaactcccactccacgatgtgaagccacagagtttcgaggtagtggttaatggtggttgtgatttttttgtttttgtttttgagacagagtctctgtcacccaggctgggagtgcagtggcacaatcttggctcaccacaacctctgcctcccaggttcaagcgattctcctgcctcagcctccygagtagctgggacaggtgcccgccaccatgcctggctaatttttgtatctttagtagagacgaggtttcaccatgtttgccaggctggtctcgaactcctgacctcaggtgatccacccgccttggcctcccaaagtgctggaattacaggcgttgagccaccacgcccagctggttgtgatgttctaatttggacttggaagtcaaataatcgccccatgccctgtggttgctgtggttgcatgccctgccccggtggaagctggggaagtgtttcctgtctgtcatcccacccattcacgtgtccttattatgggtgaagcccagagagcgagagctctcattgtggccaaggctgcagccttgccactgtcacggagcacagctcacgtctcctctgagccgttattttgtttgtatgaacccagaatgtatgtaaattctgatggggtaagcgggcagacaaaaaggtcactgaagtgtcccaaacagaatctcattgtgtactggagaggaggcaaaataatcacttgccagagggcggagcttggttttgtgggacctgaagcttaaataatttggggaggcctctttaagaaaaagaatcaaattatgaatacaaaattaggatgagggtgtttgaagggcctcatgcaagtgcggtgcctgggacttcagcttcattaacttcgcgttcagtctacgcctgcttgccagtggactgggtttgtcctgcttggagtctggttttgtttgtttccaaacttatwaaattagatgtcttttcttctttccttttgcatttgcaagtgtattaacatttaagaattgagcaggccttcaataatatagcttctctctctctctctctctcttttttttttttttttttttttttttttgctaagatgactctaacccctccctgcttcaaatcacgaacttgcattataggcacacaaaggatgctgactccctccagcagcctcgtttgcagtacggagcctggggcccttaatgggataacagggaaatggggaactggaaagaatcttccagcagttgagtctgtytgccccaggcaccatgttagatgattacattgtgttccttcgcccttttgccagggtgacgggcaggcactcccaggctctcctcaaaacagctccgattttaagagggaaaagccaggacaccacaagttgcagttcaaatatgaaactgttagcagagtcattttggcataaaacccactgtattagttggtctcccaccaggaaacagatggcatattcaaaataggatcaytggaggagagtttatttgcaaagatgtgggtgtcggggaaccacaaaggatggcgcagtaatccagagtttagcagcagccaggcggtgccctcacgaagcttgaagggatgaaggggagaacagtccctggcacccacagggagagagcggtgctgcgaggccccaggaagagaagatgtcattgtcccttgagggatacagccagccagggaaataaacaccctgacctccctctcctgtctccctctggccacctgccacgggagttggtggatgtggaccacactggtcagcctcagagggcagggtggagatggtgagggggtgcatacggaggggcaaacaaaaggtaaatagcccagcccagccctttggcctctcagcacccgctctagacttttgtccaggtgaagagcttgttcgcctaacacaggggatctataagtcgtaatagctaccatatcattgtggactgatgtcagctggtcatactctcagctgaaatcgccggtgttcctcagttaaggtaatgagtaaaacggggtgcaacggagtgaattttttttttaagatgtttcttgctttgtcccctaggctggagtgcactggcatgatctctgctcactgcaactgctgcctcccagtctcaagtgactcctgcctcagcctcccaagtatctgaggttgcaagtgcacacccggctaatgtttgtatttttagcagagacaatgttttgccatgttggccagactagtcttgaactgctgatctcaaagtgttgggattacaggcgtaagccatggtgcccaacccaacagagtgaatgtttacgtctcctcgcaattcctgtgttgaaatgctgaccctcaaggggatggtgtgagatggggcctttgggaggtgattagggtacgaggatgcggtcctcatgagtgggatcaggttcttataaaagaggccctagaggaatcctttgtgccttctgacatrtgaggccacatgaagaagatgctggttatgagccatgaagcaagccttcaccagacgccaaatccgctggctcctcgatcccctcgatctgaggcttcycagcctccagaacggtgggaaataaatttctgtgatttatgctacacccagtctatagtattctgttacagtaacccagatggattaagatggagaatggattgagatggggaagaaaaaaagccccaaattcatgaaatgtagctgctacagtccccacctccttagctgtccccaaaacctaagcaggtaatcataacttccattctgtgctcaccttacctctgctggcacctttttggacagggttctctacttggcgaggtgacccaaatcttcattcctgcagggtctgagtcctcggccgctgcgatcgtttgaacattgtttgtccccaccgaaactcatcttgaggcttggtccccactgtaatgatgttgagaggtggcgggacatttaaggggtgtttgagtcatgagggatccagcttcacgaagggattagcgcaggagtgcgtgagttcttcttgtgggactcgattgattactgcagttgccagttgttacaaagcaaggctgcctctggccgcgtgccctcttctgcttcctattttctcccatgctagaagcagcacaaggccctcaccaaatgtggccatccattttggacttctcagcctccagaagcgtgggctaagtaagcccctttcctttgtaatttacccagttggactaagacaggtgttttgttatagcaatggaaaacagactaagacagttgcattgtatttgggggtggccacagttttccattgactaggactgttggactaggagtgctccagtgatgtctctgatttcagacactgtcttcctcgccccttttcaacagcagcaatccagtttcatcctgtgatcagggtccatcctctacctactaccataacccctctctttgcttcttggtctatggcatgcagagccccaaatgagcagggagtagcttcaacttccgattcatcagaagcatgactgtttcctctaacagcatttcttttctaggccccaggacctccagcgtcaatgttgtgggatgatgggtgacagagccaaagcatcgccatcttggacaagcacggtcattctgaagttccccttgatcaaaaactgcctaaacccaaaggatatcagcctgatggctaaggtcagcatgaccataaaccataaataacatctctgaccaggaacattccaaacccctccatgagacatgccagccctgagataacctcccctccggccagaaagatgtcagacccaagataacctcccctccgaccagagacatcccaaccctgccataaacttctcccccacacagaaacattctgagcttgtaataagccccctcatcctaaaaccaatatatactcttagtccgtaagagaaagtgctcctgaacaaaattggccagaagcccctctccggcttattttctctaaaatacatctgtcgttaaattgagccacagttcgtgtttcttccctctttctttaactcttacaatgggaagcaaacttttttagtgggttattaggaataatagtgaaaagcataattctcctctccaggccttgcttcctggacccacacatctcacctgtggggaagatggaaccatatattggccactggtttaatgtacaagatgtgtctccagtcccaatggtagacatcctatagccaagactccatccaattgcctgacctccacatgtccctactctgactggaaccttgtgggtagtttaggtctctgaggatcagtcaagctcagagcaagattgaataacccctggaaggtgtggatattcctatttccccaggatcagaggcatatttaccataaagctaatgatgcttatgcttcaagactgctcacttactaaagccctggtgttaacatgatcatatgcatttataaaatttgcaaacataaaaaattttttagttggrctttattttttttttaatatttttcatttttcgagatggagttttgctcttgttgcccaggctggagtgcagtggcacgatcttggcttgccacaacctctgcctcccaggttcgagggattctcctgcctcagcctcccgagtagctgaaattagaggcatgtgccaccatgcccggctaattttgtatttttagtagagatgaggtttctccatgttggtcaggctggtcttgaactcctgacctcaggtgatccgcccacctcggcctcccaaagtgatgggataacaggcatgaaccacygtgccccacctggactttattttttattatttattgattttttggagacagagtcttgctatgtcgctcaggctggagtgcaatggcagcactgcctcctgggttcaagagattctcacctctcagcctcccgagtagctgggactgcaggggcacaccaccaagcctggctaatttttgtacttttttttttttgagacggagtttcactcttgttgcccaagctggtagtgtaatggcactatcttggctcattgcaacctccgcctccttggttcaagcgatcctcctgcctcagcctcccgagtagctgggattacaggcatgtgccaccatacccggctaattttgtatttttagtagagacggggtttctccatgttggtcaggctggtcttgaactcctgacctcgtgatccacctgcctcagcctcccaaagtgctgggattacaggcgtgagccatggcacccggccttttgtacttttttagtagagatggggtttcactgttgttggccagtctctctcaaactcctgacctcaagtgatctgcccrcctcagcctcccaaaatgctgggattacaggtatgaaccactgaacccagccccccgactttatttttgagacaggatctcactctgtcgtccaggctagagtgcagtggtgtgatctcggctcactgcaacctccacctcccagttcaagcaattcttccgcctcagcctcccgagtagctgggactacagatgcacaccaccacaccaggctaatttttttgtattttttggtagaggcagggtttccccgtgttggctaggttggtctcaaactcctggcctcacgtgatccacctgtctcggcctcccaaagtgctgggattataggcgtgagccacagcacctgaccagactttatttttttattattatttttagagatggtgtctcaccttgttgcccaggctagagtgcagtggcatgatcctagttcactgcagccccgacttcctggggtcaggtgattgtttcatctcggcctcctgagtagctggggcaacaggtccataccaccatatcctgctaattaaaaaaaattttttttagcaacagtctcactatgttgctcaggctggtctccaactcctggcctcaagtgatccttctgcctcagcctcccaagttgctgggatcataggcatgaactaccatgctgggctagttggactttattgaaatataatgttacacaaaataaattgcacaagattgaggcatattaatggcaatccctgcctctttccactctctattaccttctctctcatctttccttaaggcactagaatggttgtagttattttgggggaccatctaaaggaaaattgaggtggagatacatctgtttgggtttattgagttttgtttgtttgtttgtttgtttggagatggagtcgcccaggctggagtgcagtggtgcgatctcggctcactgcaacctctgcctcccaggttcaagcaactctcctgcctcagtctctcatgtggtacattttttgtattttagtagagacggggtttctctgtgttgcctaggctggtctcaaactcctgacctcaggcaattcgcccgcctcggcctcccaaagtgctaggattacaggtttgagccactgcgcccggcggagatatgtttatgtagatatttgtatgaagttcacagtcactgctgtgtgtagttaagtaattggtaacaattctggtatagaaatggcttccaaaaatactctacacagtaggcacacctactgtgcctatcatccagtactgcaacatgaatgcaggttataagtagtcttcaaatatgaacctggcttacagtccctggcactgaaaatacaggtaatggaagggaaccaagctttgaaacgtatggagccataagttaaactatagaagatgcttccaaatattatggggttcacacctgtaatcgcagcactttgggaggctgagacgggaggatcacttgagcccagggttcaagaccagcctgagcaacatggcaagaccctgtctctatattaagaaaaaatttaaagctgggggtggtggctcatgcctgtaatcccagcactttgggaagccaaggcaggtggatcacctgaggtcgggagtttgagaccagcctaaccagcatggagaaaccctgtctctactaacaatacaaaattagccaggcatggtggcacacgcctgtaatcccagctactcgggaggctgaggcaggagaattgcttgaacccgggaggcagaggttgctgtgagtcgagattgtgctgttacactccagcctgggcaacaagagcaaaactccatctccaattaaataaataaataaatttaaaaattaaaacagcaacaacaacaaaaaacaaatcttacagctcatatatgaaagaaacctgatcaagatttccccaacattgacaacaactctaaaattgcacttttccaataatgtgttagaagctgaaacttttctagactataactttaaaacaacaattttttttaataaaaaaaatttttttgaaacaaggtctcactctgtcacccaggctggagtgcaatggcgcgattacacctcactgcagcctagacctccctagggggctcaagggatcctcccacctcagcctccccagcaggtgtgcaccaccacacccagctaatttttatagagacagggtttcacaatgttgcccaggctggtctccaactcctgagcaatcttcctgcctcagccacccaaagtgagccactgcgcccagcatttttttttttttttttttttttttttgagacggggtctctctgttgccctggctggaatgtagtggtgtgatctcggctcactgcagcctccaactcccaggctcaagtgatcctgttaccagaaaggggtcccaaaccagatccaaagagagggtccttggatcacgagcaagaaagaatttgaggcaaatccatagagtaaagtgagagcaagtttattaagaaagtaaaggaataaaaaatggctattccataggcagagcagcaagcagcatgaacttattacttcttgattatatgctagacaaggaatagattattcatgagttttcggggaaaggggtgggcaattcccggaactgagggttcctccctctttttaaaccatatagggtaacttcctcacgttgctacggcatttgtaaactgccatggtgttggtgggagtgtatatatgctaatacatacatacatataattagcatataatgagcatgaggatgaccaaaggtcacttccatcgccgtttggttttggtgggttttggttggcttctttactgaaactgttttattagcaaggtctttgtgacctgtatcttgtctgacctcctgttttatcctgtaactaagaatgcctggggctggacgcggtggctcacgcctgtaatcccagcactttgggaggccgaggtaggcggatcacgaggtcaggagttcaagaccagcctggccaacatggtgaaattctgtctctactaaaaatacaaaaattagccaggcatrgtggcaggcatctgtaatcccagctactcaggaggctgaggcaggagactcacttgaacccgggaggtggaggtgcagtgagccgagatcgtgccactgcactccagcctgggcaacaagagcaagactctgtctcaaaaaaaaaggaatgactgaacctcctgagaatgaagcccagtaggtttcattttacccagcccctattcaaaatggagtctaggccaggcgtgctggctcacacctgtaatcccagcactttgggaggctgaggcaggcggatcacaaggtaaggagtttgagaccagcctggccaatatggtgaaaccccgtctctactaagaaatacaaaaattagccagacatggtggtgcacacctgtattcccagctactcaggaagctgaggcaggagaattgctggaacccaggaggcagaggttgcagtgagccaagatcacaccactggactccagcctgggcaacagagtgagactccatctcaagaacaaaaaaacaacaaaaaaaccycaaatggaatctaaagttcaaacgcctctgacatcttaggaagccgaagcaggaggatcacttgagcccaggagtttgagaaaagcctggacaacatagtgagacactgtctctataaaaaaaaattttttaattggccaaccatggtgttgcacactggtaatcccagctactcaggaggctgaggcgggaggaccacttgagcccagcaggttgaggctgcagtgagctatgactgcaccattgcactctagcctgggcgacagagcaagacctcatctctctaaaaaagagaaaataaataaatagtatttgctttatttacaactgtttatttgtcattttgggttattttattaaaaaatggtacctcaaattgtattagtctcagggccttgtgaacccaaaagtatctgagacaggtctcaatcgattttgaaagtttattttgctgctgggcgtggtggctcacgcctgtaatcccagcactttgggaggccgaggtgggcagattacaaggtcaagagattgagaccatcctggccaacatggtgaaacctcgtctctactaaaaatacaaaaaataaactgggcgtggtggtgcgtgcctgtagtcccagcttctcaggaggctgaggcaggagaattgcttgaacccaggaggcagaggttgcagtgagctgagatcacaccactgcactccagcctggtgacagagcaagacttcgtctgaaaaaaaaaaaaaagtttattttgcaaaggttaagcagggcccatggcacagtctcaggaggccctgatgacatgtgcccagggtggtcagaatacagctgaagtgggcggatcacctgaggtcaggagtccaagaccagcctgaccaacatggagaaaccctgtctctactaaaaatacaaaattagccgggcatggtgacacatgcctgtaatcccagctactcaggaggctgaggcagaagaatcgcttgaacccaggaggcagaggttgtggtgagccgagatcacaccattgcactccagcctgggcaacaacagcaaaactctgtctccaaaaaaaaaaaaaaaaaaaaaaaaaaaaaaaaacagttatcagtaaaaaaggaatgtctgggttatgataagtggatgtggagatcaaggttttatcatgtaaatgaagcctccatgtagcaggcttcagagagaatagattgtaaatgtttcttatcagaggtaaggtttgtgttgatgttgatgctggagggataatgaggcatgtccaacctccttttctatcatggcctgaactagtttttcaggttaactttggaatgtctttggccaagaggaggggtccattcagatgattaggggggccttagaattttattttttatttacagcccccaaacccacatctgcccctgcacacagtgactgcccccgttaccctggggaatggctgcagatccctctgtgcatatggggtgggagggtgagggcgtggggaagagtcacaggttacctgtggcacattgcagggtccttcccaaaggggcctggcctgtctcaggccacaggccctggatccctgcactagcttagctctgaggcctgtgtaaaaggttgtgaaaccacactgcagtgacttgattttcagggttgccccatcttttggcttccctgggctgctctggaagaagaattgccttgggctgcacataaaatacactaacgatagctgatgagctaaaaaaaaaaaaaaaatcacaaaaaaatctcatgatgttttaagaaagtttgagaatttgcattgggccgcattcaaggctgtctcgggacacatgcactctgtgggctgtgggttggacaagcttgatttaggttttgttccaccagactggagtgtttcatcctgcctgtgtctagcagcatgttagaaggctgcattctcttagcagagaccctgtgattgagacagagcaggattcctccttagaggcctgtggctgctcccccgaccaccccagcatggaaataaaacaaaaaccttgagttccttccttcaagggaaattccaggcacctagctgaccttgagaagtaaatgagcaacttgataagccagaaagtgtgaaaggaagaataaaatcttgggagcccaaattcactatgccaaaaaggaaaagttaagtgtggaagctgagtcacgggagggggcgggaacaagtgcctttccttttgtttctaaactgatagctgcagatggaaggccacaggtggcctccttcaccctgacaatgtaaattaacagcttatctttgcaggcgggggatgagggtaggtaagggacaagaggagactagaaatcatcgtccccacccactccaagataaatgcatatttgactgtttcctgtactctgtttattttgtcttatgtaaagtgccaatttaccatgtkagatgaatacagaattgactgttccttytacccmccgcccccacccccttttttttttttctttttttgagacggagtcttgttctgtcacccaggctggagtgcagtggtgtgatcttggctcactgcaacttctgcctcccgggttcaagcgattctcctgcctcagcctccccagtagctgggattacaggcgtgcatcaccacgcctggctaatttttgtatttttattagagatggggtttcgccttgttggccaggctggtctcaaactcctgacctcaggtgatcctcccacctcggcctcccaaagtgctgggattacaggcgtgagccaccgtgcccggccttctactccctttttttcctgtgcaacatgtggattcagtgagcytaaacaaagccgcaaaacaaagtgaccatatcctccctcttttttttttttttaatgttccctttcccctcctgcctgctttttcccctttactttttatttttattttttgagatggcgtctctctctgtcacccaggctggagtgcaatagcgtgatcttggctcactgcaacctccgcctcccaggttcaagcgattctcctgcctcagcttcctgagtagctgggattacaggtgcatgccaccacactcggctaatttttgtatttttagtagagacagggtttcaccatgttggtcaggctagtctcaaactcctgactttgtgatccagctgcctcggcctcccaaagtgctgggattacaggcctgagccactgtgcccggccactttcatgcacgtccgtgtaaagagaccaccaaacaggctttgtgtgagcaataaagcttttaatcacytgggtgcaggcaggctgagtccaaaaagagagtcagygaagagagataggggtggggccrttttataagatttgggtagataaaggaaaattacagtcaaagggggttgttctctggcaggcaggagtgggggtcacaaggtgctcagtgggggagcttttgagccaggatgagccaggagaaggaatttcacaagacaatgtcatcagttaaggcaggaacgggccattttcacttcttttgtggtggattgtcatcagttaaggcagcaaccagccatctggatgtgtacgtgcaggtcacaggggatatgatggcttagcttgggcccagagggctgacattcctgtcttcttatattaataagaaaaataaaatgaaatagtggtaaagtgttgggatggcgaaaattttgggggatggtatggagagataatgggggatgtttctcagggctgcttcgagcgggattaggggtggcgtgggaacctagagtgggagagattaagctgaaggaagattttgtggtaaggggtgatattgtggggttgttagaagaaacatttgtcatttagaattattggtgatggcctggatacagttttgtatgaattgaaaaactaaatggaataagagaaggagaaaaacaggtataaaaggtctaagaattgggacgactcaggacatctgattagagagtgcctaaggagattcagcatagtcctgccagcaaagattatttatttacttcaagaggtaagagtggcagtttggggatagcaccaggagatatcagctgtgatggcttagagaaacagtgtaaaccggcagtgtaaacaagagcagagcatgtatgagtagttgagaacggtgaataggagtatgactagacagaagatagtagggatgacaagtttttttgggggcacggtggaagttggtctgatgtctggaatgagactggggcctaataaaaaggagcatctatacaggagctcaaatgggctgtaccttgtagcattctgaggacatgtctgacttctgagaagggaaagtggtaaaagtattgtccagtcctttttaagttggtggctgagcttggtgaggtgtgtttttaaaagacctttagtccgttctacttttcctgaagacacaggacagtaagggatataaaggtttcactgaatacyaagagcctgaaaacctgcttggctgatttgactaataaaggctggtctgttaacagactgtatagaggtgggaagactaaactgaggaattatgtctgacagaagggaagaaatgactgcggtggccttctcagaccctgtaggaaaggtctgtacctattcagtgaaagtgtctacctagactaagaggtattttagttatctgactcggggcatgttgagtaaagctaatttgccagtcctgggtgggggcaaatcctcgagcttgatgtgtagggaagggagggggcctgaataatccctgagggatagtagaatagcagatggaacactgagaagttatttccttgaggatagatttccacgatggaaaggaaatgrgaggttctaagaggccggctagtggcttgtactatagcataacctgcctttgctggtgtgtggcgattaggcctggtggaaaccaccatcaataaatcaagcgtgatcagggtgaggaacaggaaagaaggaaatatggggaaattgggtgaatgtcaggtggatcagagagatacagtcatgggggtcaggtgtggtatcaggaataatgtgggaggccggattgaagtccgggccaggaacaatggtaattgtgggacttaacaacgagtgagtacagctgaaggagccagggagcagaaagtatatgcgtcaggtatgaggaagaaaatagattttggaagttatgagaaatgtagagagtaagttgagcatagtttgtgattttgagggcctctaaaagtattagggcggcagcagccgctgcacgsagacatgagggctaggctaaaacagtaaggtcaagttgtttgcacagaaaggctacagggtgcggtcctggctcttgtgtaagaattctgaccgcactaaccatgcctaggaaggaaaggagttgttgttttgtaagggattgaggtttgggagattaatcagacatgattaacagggagagcacgtgtgtttttaygagaattatgccgagataggtaacagatgaggatgaaatttgggcttgactgaagtaatgggggctgtctrtgaagccttgyggcagtacagcccaggtaatttgctgagcctgatgggtgtcagagtcagtccaagtgaaagygaagagaggctgggatgacgggtgcaaaggaatagtaaagaaagcaygtttgagatccagwacagagtaatggattgtggagagaggtattgaggataggagagtatatgggtttrgcaccatggggtggataggcaaaacaatttggttgataaggcatagatcctgaactaacttgtaaggcttgtctggttttaggacaggtaaaatgggggaattgtaaggagagtttataggctttaraaggccatgctgtagcaggcgagtgataacaggctttaatcctttcaaagcatgctgtgggatgggatattggcattgagccgtgtgagggtgattaggttttaatgagatggtaaggggtgcatgattggtcaccaaggagggagtagaggtatcttatacttgtgggttaaggtgggggaatacaagaggaggacgcaaaggaggctttggattgggaagaagggcagcaataagatgcagctgtaatccaggaatagtcagggaagcagatcatttagttaaagtgtctcagcctaataagggaactgggcaggtggggataactaaaaggagtgctcaaaagagtrttgtctaaattggcagcagggttggggagttttaagaggtttagaagtctggctgtcaatacgcacagcagttatggaggcaagggaaacaggcctttgaaaagtaggtaatgtggagtgggtagcctccgtattgactaagaaggggaaggacttaccctccactgtgagattacttaaagctcggcatccgcgatggtctacggggcttccaaggcgatcaggcagcatcagtcttcagctgctaagccgagaaggagtcagtcagagagccttgggccagaattccaggggttctgggagtggctgccaggtgagttgaacagtccgatttccagtggggtcccgcrcagatgggacayggcttaggaggaatcctgggctgcaggcattcctcggcctggtggtcagatttctggcacttgtagcaagttcctgggggaggaggttctggaggaacgcctggccactgcggtttaggcgtttggaagttcttgtgggctggagatgtggctggggtttgtctcacagtaaaggcaaggaattgcracttttttctattattgtacaccttgaaggtgaggttaattaaatcctgttgtggggttygagggctggaatttaatttttggagttttatttaatgtcgggagcagattgrgtaataaaatgtatattgagaataatacagccttttgaccttttaggtctagggctgtaaagcatctcagggttgctgccgaacgagccatgaactgggctgggttttttatatttgatgaaaaagagcctaaacgctatctgatttgggataaagaaaaaggagcattaaccttgactatgcctttagctccagccacctttttaagagtaaattgctgggcaggtgggggagggctagtcacggaatgaaactgtaagccggacgggtgtgtggaggggaggtgataaaagaattatagggtggaggagcagaggcttgaaggggtgggttgcccctccacacctgtgggtgtttctcgtaaggtggaacgagagacttggaaaagaaaaagacacagagacaaagtatagagaaagaaataaggggacccggggaaccagcgttcagcatatggaggatcccgccagcctctgagttcccttagtatttattgatcattcgtgggtgtttctccgagagggggatgtgtcagggtcacaagacaatagtggggagagggtcagcagacaaacacgtgaacaaaggtctttgcatcatagacgaggtaaaggattaagtgctgtgctcttagatatgcatacacataaacatctcaatgctttacaaagcagtattgctgcccgcatgtcccacctccagccctaaggcgtttttccctatctcagtagatggaacgtacaatcgggttttataccgagacattccattgtccagggacgggcaggagacagacgccttcctcttgtctcaactgcaagaggcatgccttcctcttatactaatcctcctcagcacagaccctttaygggtgtcgggcwgggggacggtcaggtctttcccttcccacgaggccatatttcagactatcacatggggagaaaccttggacaatacctggctttcctaggcagaggtccctgcggccttccgcagtgtttgtgtccctgggtacttgagattagggagtggtgatgactcttaaagagcatgctgccttcaagcatttgtttaacaaagcacatcttgcacaacccttaatccatttaaccctgagtttgacacagcacatgtttcagagagcacggggttgggggtaaggtcatagattaacagcatctcaaggcagaagaatttttcttagtacagaacaaaatggagtctcctatgtctacttctttctatacagacacagtaacaatctgatctctcttgcttttccccacatttcccccttttcttttcgacaaaaccgccatcgtcatcatggcccattctcgatggtcgctgtctcttcggagctgttgggtacacctgcagactaacaacagacaaaacargcacasaaggattaatatgagatttataattgtagtacttccgatggtcttaacccaagtgacagggttaagatttgcgaggccatcagcaactcctgcaattgcctcagttcctggcaccaaatttaaatgggcttttgatgcttcaaaaattttttcttttaatttggaaatgtctaaagtgagattatcttctcttccctgtagatggtgtctaaccatgtcccagtgatgctcagactcattataaatttggggtgtaatacaaaagtctgacgtattgcagtcacactgtaactggaaacgacgttctaagctcatgagtctgtctcctatccaaatgagtttgtctaagatgattaatttgatttgccaatttttgatcaatactagattgtgaattccacaatcttgyagaattcttttgccaatcattaacaaagtttaccgactgaacagaagagtgcaatgcaactcctgccacagcagccgtagctgtgactgcaattaatcccataatcactgcaattaaagtaaaaatgaatcttttggatctatttaaaatgccttttaatacttcagtcaaaatatggatggatggcgaggcctcccacggtctgtccatggacacagggatccacacgccttctcttgctctcaccagcagaatacgctgctgccaattaaaagttgaatcaatgcaagtaaacaatctacaattttcacaggttatagtttgggagtctggtttaataactatatttcctacaactagcatataagggggctttacgcaactctgtaaaggaaccgttagactggaatttaggtcgatagtataaaatggcttacgatctcttgtttctgaagtttgatttccagaccaaattctaatgtggtgtgaggccacaataagcctccataattctggatgttcaggaccagaaacaggacttattatttttggtcttggggtagagattcctttttctccccattcccaagggtacaaagactgtaattttttatgcttatgtttgtctagactttctgttaagtcgctatcaacagctggactcacttgtgcacttggacacaactgagtttgtcctgagcaattgtgatcgaattgacctcgaggtgcccaatctataatagttccgaattcattgttttgtaatatcaccgcactattggccacacattcttcccaaactaaaacttctgtattttttgattctttgggaatttccttggggcaaggttttcctttaggtctaaattttaatgatctttgataagaaaagtcctgtaaataatttactcgtggcctgagtgacatcccgcttaccatgtgataagtgaatctaccgttaggactgacagtaggtacttctaccaaccaattttggactgcatgtattaaacatcctggtgctctccctaggcaaataggataacgatacccagtggaaatatttatcattatcccttcttcctcaggtttgatagggcagcgatcrtctgtggggccaggtacccgtacactatcattaacatatacttctataggattatccatccatgtgactggtgttaccatctctgtggaggcccttttctttgcatctccgatgggttcattgtagaacttcaaatgtctagtgggtatccaaacaggaagctgattttctcctggtgaaacacaagcaaacctctcccccacgttatcaccttccctatttcccatgtcttatttttattatctttccaccaaattagttttccttcatgtgggctgttctttttaccagtaagatgttgttctgcagaagtagtagtctgatttctataaatgtttaaaaaaatttaaagtatagagtgctagattaagttgcatctgaggagtggtacactccttactgtctcccccttctttttgtttaactaattgagttttgagtgttctattagttctttcaactatggcctgtccttgggaattataaggaattcctgttgtatgtgaaattttccactgacttaagaatttttggaaagctttactacaatatcctggtccattgtcagttttgattttttctggaactcccatgacagcaaaacaagacaataaatgttttttaacatgggaagtactttctcctgtttggcaagctgcccatatgaaatgtgaaaagtatcaactgttacatgaacatatgataatcttccaaatgaaggaacatgcgtgacatccatttgccataacgcattaggacacagacctctgggattaactcctgcctcttgagtgggcaggtgtaagacctgacactgggtgcaatgttgtacaatatcttttgcctgtttccatgtgacatcaaatttgttttttaatcctgctgcatttgcatgagtcaaagcatgaagttcttgtgcttttatgaatgcagatgataccagtaagtcagcttgttcatttgctttagtcaaaggccctggtaaattagtgtgtgcttgaatatgagtaatataaaatgggaaatttctttttcttacagtttgttgtaataaattgaatagctggtttaactgatcatccatgctatatttaattagagctgtctcaacatcccttgtagcctgtactacatatgcagaatctgatataatatagataggttggtcaaaatcttgtaacactgtaatgactgcaaccaactctgctctttgagccgattgatatggagttttgattactcgttctttcggccctgtgtaagccacttttccattgctggaaccatcagtaaatactgttagagcattttctaaaggttcacgtctgctaattttaggtagaatccaagtagtcaattttaagaactggaagatttttgtttttgggtaacgattgtcaataattcccacaaaattagcaagaccaatctgccatgcaccagaattgataaaggcttgtctaacttgttcctttgttaaagggacaactattttgtctgggtcatttccacataattttattattcataatcttgtctgaccaattaatgtagctatttgatccaagtacaatgtaaaagtcttaactgtaccgtgaggaaggaatgaccactccacaagatcagtattttgaacaatgatgcctgttggagaatgtgcagtggcaaaaatcaaaagttggaatggggctaagggatctattctatttatttgcgctgactgaattttttcttccactaatttaatttcttttgttgcctctggggttaacattcttttactatttaagtctgagtctcctcttaagatagagaacaaatttgacatggcataagtaggaatgcctagagttggccgaatccaattaatatctcccagcaatttttgaaaatcatttagtgtttttaatgtgtctttcttatttctattttttgtggcttaatttttctatctgcatccctaaataatgaaaaggagtagaggtttggatcttatcagatgctattgccagtcctgcattggcaacctcggcttgcagaaatgtataacagtcaattaatttatctctcgtttctgcagcacataaaatatcatcaaaataatgaataatatagccgtctgaaaacttgtctctaactggttgaagagcttgacctacaaaagtctgacaaatagttggactattaagcattccctgaagtaacactttccactgaaacctggtggctggttctttattatttatggctggtatagtaaaggcaaatttttcgcaatcctgctccaccagagggatggtaaaaaagcaatccttttgatcaattataattaaaggccaatcttttgggatcatggccagagagggtgacccaggttggagaggccccatgggttgaattacagcgtttacggccctcaagtcagttaacatatgccatttgccggatttcttctgaattacaaacacaggagaattccaagacgagaatgaaggctcaatatgtcccttttctaactgttcatttgctaataaatgtaaagcctccagtttttgttttggtagcggccactgatttacccacaccggtttttctgttttccaagttaatggtatgtgtttaggaggctctacagtggccgcccctaacaaggataccctattccttctctttcttgatttattttagcctcaactggaactttaatgccatcttcatttttccctagtccctttcctggtatatatcccatcttggtcatgattttttgactcctggggctatataatggagagggcatggtgatttccacaccccattgttgtaataaatctcgaccccacagattaagaggaattgaagtaatcatgggctgaacagtactttcttgattatctggccctaagcaatgtaaaatctcagtactttgatacacttctgaggctgtgcctatgccgacaaatcctgtaacagccttttgtttaggccaattttttggccactgatttaaagcaatgatagagacatctgctccagtgtctaccaacccttcaaactgttttccttgaataatggccttacacacaggtctgttctttgagacctgacttgcccaatatgcagcctttcctgtcagatcagtgcttccaaaccctcctgttctttttatttcactatttccaaccttaatatatggcaggagtaataatcgagcaatcctgtctcctggactggcactccaaggaattgaagagctaataaccaattgaatttcgcctttatagtctgaatcaaccacaccagtatgaatttgaactccttttagatttagacttgatcttcccaagattagtcctacagtcccctcaggcagtgggccatatacccctgtggggattttttgtgggggcttccctggaagcagagagactgcttgtatagtacataaatctactgctgcactgccgcttgtggcgggggacaattgttgtattgtggtaactggcttattccctgaaacacttgggacagtgggggtttttgtccctgaaaaccctgaggaacaaatggctgaattgggaatgccccagtttgttgtggggcctgaggctggcccgtttgttcatttcccgacaatggttgcctgtttttatcaaatttagaatgacactgactagccccatgttttccttttttacattttggacataagtcaggtggctctctacctgttgtagttgcttgaatagttatattctgtttatttaagactggccaattcttttttaaatgaccaatttgaccacaattataacattttcctccaaatgttttaacttgtcctcctaaaacaactcctgttattgcttgagccataagcatagctttatgcatatctcctccgattccatcacaggcttttacatactctgagattacatctgaccctgtgggaacctttccttttaatggcttaatggctgattgacactcaggattggcgttttcatatgccatcaactccactatgaccttatgggctttttcgtcggcaattgacttttgagcaacatcttggagccttgccacaaaatcagggtagggctcttttgaaccttgtcttactgtattaaatgaggggcaggcgcttcctgggtcttggattttttcccaggctctaaggcagatagctctaacttgctcaatggcctcattttgcatgaatgcttgttgactaatagtactccaattttgacctcttcctaatagttgatctgcatctatgttaactggaggattggcagccctatttcttcggacctgttcttgtaccccatcaatccaccaagtcttaaattgtaaaaattgagagggtgagagagatgatcttgccagaatctcccaatcataaggaatgagtctatgtccatgagcaatggaatctaataatgtactcatataaggggagttgggtccatactgttttactccctctttcatatcttttagcatttttatcaaaaaagacttgtatctggcctcaactgtgagaggctctccctcttgggcttcttctccaggtggcatcggttctaacgttactgggaattgccacgcctcagtatctccttcctttcttctcaataatttcatgtaattcactaccctgtctactaggcggtgccgtaggattaagtctcctagtgggcggctgagggtatggcgccctgccctgtggtgctgggggcattcctggatatccatactgactttctgggggtggctgatactgaagttcagccagcggccagtattgataagctactggtggttggctcttattttctctaacctgcgtttgaggttgtaatgttacgggcacctgacctgctggaagaggacttggccctcgtggtttagactctgatggccccactaattcgggaccttttccttctaattttaacgtttcaggatatatcacctcctgtaattgattatagtcaacattttgcattgactgagccattaccggctctgctacatattcgcaatgtaaaccttccgtttctttctgggatttttttccttgtcttttcattacaatctattaaacagcttccaggggcatcagaaactgaaacgctatcttcttctgtttgaaatggttctaaagctgctttaataatggcccaatcattccatactgtaagtggaatgatattacccttcctacttgcttgttttagttccttaacaattcttttccaatcttttagatctaaagttccttgttctggaaaccatgggcaaaattgttctattgtttgaaatagcttgattagattttttgtagatactttaactccccctctttttaaaagaattttaataaagctgagaaaagaggcatatttacttttagttttactttagtttgccccattatcaccctagcttcttctgagcccacaagcttaccgtaaggctgactgtagacgtactcgggatctctcgtcgacttgtcctcaatgaccacgcttgagagtaccttcaccctagagaaaagcctccacgttgggcaccagatgaaggggtgggttgcccctccacacctgtgggtgtttctcgtaaggtggaacgagagacttggaaaagaaaaagacacagagacaaagtatagagaaagaaataaggggacccggggaaccagcgttcagcatatggaggatcccgccagcctctgagttcccttagtatttattgatcattcgtgggtgtttctccgagagggggatgtgtcagggtcacaagacaatagtggggagagggtcagcagacaaacacgtgaacaaaggtctttgcatcatagacgaggtaaaggattaagtgctgtgctcttagatatgcatacacataaacatctcaatgctttacaaagcagtattgctgcccgcatgtcccacctccagccctaaggcgtttttccctatctcagtagatggaacgtacaatcgggttttataccgagacattccattgtccagggacgggcaggagacagacgccttcctcttgtctcaactgcaagaggcatgccttcctcttatactaatcctcctcagcacagaccctttacgggtgtcgggcagggggacggtcaggtctttcccttcccacgaggccatatttcagactatcacatggggagaaaccttggacaatacctggctttcctaggcagaggtccctgcggccttccgcagtgtttgtgtccctgggtacttgagattagggagtggtgatgactcttaaggagcatgctgccttcaagcatttgtttaacaaagcacatcttgcacaacccttaatccatttaaccctgagtttgacacagcacatgtttcagagagcatggggttgggggtaaggtcatagattaacagcatctcaaggcagaagaatttttcttagtacagaacaaaatggagtctcctatgtctacttctttctatacagacacagtaacaatctgatctctcttgcttttccccacaaggctgaggaagaattgggacctagctcagcctggggaggagcagcctggggaggaggggagaggttagatgggtctgtagaaaaggaggattagaaagactcagcaacgcttggggttgggactgaagggacaggcaggagggaaagaaggaagatttgggatgagttgcattgggagcagagactatggagagactgatgtataaaagaatgcctgcacgtcaggcacctcagaccatttgcctattttacgacaagaagtatttagatcttgcaggatggaaaaattgaaagagccattttctggctatttggaactactgttgagtttgtattggggtcaagcagcattgcagaagaaaataagatgcttagattttaggtcaggtgagagttgaagaggttttaagttcttaagaacacaggctaagggagaagaaggaggaattgagggtggaaggttgcccatagtgaagcctagagaaaagagagagtagagacatgaagggaaggggcttgggggttcttaccctccagaaagcgggaaaggggtcagggcacagagatatgaggtcggggcgcagaaataagggattggggtgcagagatataagaggttggggcatggaaattagggatcggggcgcagagatataaggggttggggtacttgcccctcccccagaaaagtggtacttgccgctaagggtgaaggagaaggggttgggggtttcttgcaccccagaaaggtggagaaggggtagagacacggagagaaggggttggggtacttaccccttccccagaaaagtgggacttgccgctaagggtgaaggaccaaggcaggtgtccctgcgtggtctgacacctctgaaacatgggtgaataatcagagaggcgtccctacaatgattaaacaccaagggaaggctgccttccctagtccgtgatcggcgccggagttttgggtccacggagaaaacatgtctcctttgtctctaccaggaaatgaaaggaattgaaattaagagaagggagagattgaagagtggaaaggagaaagtggttgagggatagtgagagaggttggagaagagagtaagaagaggccgcttacccgatttaaaattggtgagatgttccttgggctggtcggtctgaggacctgagattgtaggtggatctttctcatggagcaaagaacaggaggacaggggattgatctcccaagggaggtcccccctccccatccgagtcacagcaccaaatttcatgtgcgtccatgtaaagagaccaccaaacaggctttgtgtgagcaataaagcttctaatcacctgggtgcaggtgggctgagtccgaaaacagagtcagcaaagacagataggagtggggccattttataagatttgggtaggtaaaggaaaattacagtcaaaggggggttattctctggcaggcaggagtaggggtcacaaggtgctcagtaggggagattttgagccaggaagagccaggagaaggaatttcacaaggccaatgtcatcagttaaggcaggaacaggccattttcacttcttttgtggtggaatgacatcagttaaggcaggaactggccatctggatgtgtacgtgcaggtcacaggggatatgatggcttattttgggctcagaggcctgaccgccactttttcccctgtaaatattgaagccctcaaagtcttctctggaaaaagtatgggccacagattttactgtggcttgtgtctttttttcccatgtacatcctcaaccttggcaaaataaacctctaaattgattgaacattgcctcagtcattttctttgtgtgtttttttttttttttttttttttttttgatggagttttgctcttgttccccaggctggagtgcaatggtgctatcgaagctcacaacctctgcctccctggttcaagtgattctcctgcctcagcctcccgagtagctgggattacaggcatgcaccaccacgtccgactaattttgtatttttagtagagatggagtttctccatgtttgtcaggttggtcttgaactctcaacctcaggtgatccgcctgccttggcctcccaacgtgctgggattgtaggcatgagccactgcgcccagaccattttctttggtaaaagtaacttaaaataattgctaaggaaattagggtcaggagatgttttgtttcctatagaaactaaagataacatcttaccatatgtccctgagttgttttttcagaaaccctgaccaaacagaaacccaccaagcagatcccaccagcttgtaagcctcacataaggggaaactgaggactgaactctgatcacagttccttgttctacatttcttcctgaggggcctggaggaggtcattcccacatgccagggctaacatttcttttttttttttttttgagacagagtcttgctctgtagcccaggctggagtacagtggcacaatctcagctcactgcaagcttgaccttctaggctcaagtgatcctcctacctcaggctcccaagtagctgggaccacaggcacaagccaccataccctactaattaaaaaaaaattttttttgtagagattggtgttcactgtgagacccccatgtatagccatcatatattggtttatggctttgcctgtaatctgtgcctctctgcctttgaaaacccttacctggccaggcgcggtggtcacacctgtaatcccagcactttgggaggccgaggctggcggatcacgagatcaggagatgaagaccatcctgactaacatggtgaaacccagtctctactaaaagtacaaaaaattagctgggcgtggtggcaggcgcctgcagtcccagctacttgggaggctgaggcaggagaatggcatgaacctgggacgcagaggatgcagtgagtcaagatcacgccactgcactccagcctgggcagcagagcgagtctgtgtctcaaaaaaaaaaaaaaaagaagaagaaaaaagaaaacccttacctaggccatgcacgatggtttaggcctgtaattccagcagtttgggaggccatggcgggcggatcacctgaggtcaggagtttgagaccagcctgaccaacatggagaaacccagtctctactaaacatacaaaattagcctggtgtggtggcacatgcctataatcccagctactcaggaggctgaggcaggagaatcacttgaacccgggaggcggaggtggcagggagctgagatcatgccactgcactccagcctgggcaacaagagcaagactccatctcaaatacaaacaaacaaaaacccttacctgtaagccatccaggagtttgggtcttcagcatgagctgctggattctccttgcttggtgccctgcaacaaatgcctcactttctctcactgttatcccagtgccacagtttggctctgctactgtgggtgagtggaccacagtttggttcaagaacatgatcaactgcctcgatcatagatccatgtggttcaaaacacttaccactgaggcgctgtgcttgttgtgatcattgcactcaccttgtttactctgggtaaaatgaggctgagacctactgggctgcattcctgggaagttcgggtgtggtggtgcacacctgtagtacccgctactcgggaggctgaggcaagagaatcacttgaacacgggaggcagaggttacagtgatccgagatcgcaccactgcactccagcctaggcaacagagcaagattctgtctcaaagtaaaaacagcaacaaagaaacaaacaaaaaacacatttgcaagatgtgtataagaaaaaagaagggctgggtatggttgcttctgccggtaatccttctttactgcaacctgttttatcagcaaggtctttgtgacctgcatcttgtgccgacctcctatcccatcctgtgatttagaatgcctgaacttcctgggaatgcagcccagtaggtttcagcctcattttacccagacccattcaagatggggtcattctggttcaaatgcctctgacacctgtacttcctggagggctaaaaaaaaaaaaaaatgaaaaacccttccctgaggcattaagaagccactggtgtgaagcttcttacaagaagcaccaccatcctacaagagatcggtgatagccaggatagcagttggagatgacaagagggatgttggaacggggctgtctaatttcagcaggaatcatggagatgctgagtgggaaaggccaggagcttcgccatcagaaacaggtttcagtaaagaagctggctaaaacccaccaaaaccaagaaggtgatgaacatgacctctggtcgtcctcactgtaattatacgctaattataatgcattaacattctaaaagacaccctcaccagcaccttgacagtttacaaacgtcatggcaacatcaggaagttaccttgtatgatctaaaaggggaaaagtcctcagttttgggaattgcccacccctttcccagaaaactcatgtataatgtactccttgtttagcatataatcaagaagtaacaataagtataaacagctgagcaccccatgccgctgctctgctgctctgcctatggcgtagccattcatttattcctttcttttttttttttttttttttttgagacggagtctcactctgtcgcccaggctagagtgctgtggcacgatctcggctcactgcaagctccgcctcccgagttcatgccattctcctgctcagtctcgagtagctgggactacaggcgcctgccaccgtgcccagctaagtttttgtatttttagtagagacagggtttcaccgtggtctcgatctcctgacctcgtgatccgcccgcctgggtctcggaaagtgttgggattacaggcgtgagccaccgcgcccagccctcctttactttcttaataaatttgctttcactttatggatttgccttgaattctttcttgtgcaaaatccaaggaccttctcttggggtctggattgggacccctttccggtaacagcaggttgagtataatgaagccattccaccaaacccattttctgaagtcttaggaatcctttcctgacaaccttataccagggaagatctggcattacttttgaggcaggcttttgctgtgtcacctaggctggagtacagtggtgcaatcatggctcactgcagtcttgacttccaggctcaggtaactgtctcacctcaccctcctgagtagctaggactacaggcatgcaccaccatgcccagctaattctttctttttttttttttttttgaggaaaaaaaaaaaaaagtcttgctctgttgccaggctggagtgcagtggcacaatcgcagctcactgaaacctctgcctcccaggttcaagtgattctcctgcctcagcctcctgagtagctgggactacaggcgcctgccaccatgtccagctaattttttgtatttttagtagagatggggtttcaccatgttgggcagtatggtctcaatctcttgacctcatgatccacccacctcggcctcccaaagtgctgggattacaggcgtgagccactgcgcctggccttttattttgagatgaagtctcgctctgttgcccaggctggagtgcagtggcacgatttcggctcaatgcaacctctgcctcctgggttcaagcaattctcttccctcagcctcctgagtagcccaggcatacaccaccatgcctggctaatttttgtatttttagcagagacggggtttcaccatgttggtcaggctagtcttgaactcctgacctactgatcccaccccacccttggcctcccaaagtgctgggattacaggcatgagccactgcacccgaccggttttttttgttttttttttttgtatggtttatacaccaaagaggtagaaggttttgctaatctgtattaacaaagcctggagtgaaacatgtgggagtgaattctcagtgtgttggatgaaaggtgatggaatataagacttgatggggccaaattcaataacatcggtgcagtcacctgcgattcagaatttaatgtttttttttttatttgtttttgttgttgttgagacaaagtttcactattgtcgtccaggttggagtgcaatggtgccatctcggctcactgcaactctgcctcctgggttcaagtgattctcctgcctcagccttccgagtagctgggattacaggcgcccgccaccacacctggctaatttttgtatttttagtagagacagggttttgctgtgttggccagactggtcttgaactactgacctcaggtgatccacctgcctcagcctcccaaagggctgggattacaggtgtgagccaccacgcctggccagaatttaatgttttgactgaagcacctgaggctggtctctttttattttattttatttatttatttttttaagatggagtctcactctttcgcccttgctggagtgcagtggttcagtcttgccttactccaaacctccgcctacctagggttcaagtgattctcctgcctcagcctcccgagtagctgggattacaggcatgcaccaccatgcctggctaatttttgtatttttagtagagatggttgctcaggctggtctcaaactcctggcctcaggtgatctgtccgcctcggcctcccaaagtaatgggatcacaggcatgagccactgtgcccagctggatctggcatttttaccttatcagttgtaggccactggttctcaaactttggtgtgcataacatcaactgaaaatacaaaattagccaggtgtggtggtgcatgcctgtaatcgcagctactctggaggctgaggtaggagaatcgcttgaacctgggaggcagaggttgcagtgagccgagatcgcgccatcgcactccggcctgggtgacagagtgagactccatctaaaaataaataaataaataaatataaataaaatttaccttcacttattcctgcttcagcactcatcctttttttttttttttttttttttttgagactgagtctcactctgtcgcccaggctggagtacagtggcacagtcttggctcactgcagactctgcctcctgggttcaagtgattctcctgcctcagcctcccaagtagctgagagtacaggtgcatgccaccacacccagctaatttttgtatttttagtagagacggagttttaccatgttggccaggctgctcttgaactcctgacctagtgatccccccaccttggcctctcaaagtgctgggattacaagcatgagacactgcacccagcccctttctttatatagatacaaatttttgacctatattattttccttctctctaaagaactttttaaagcacttctttcaaggcaggtctattggcaacaaattccctcaatttctctttgtttgaaaaagtctacttttgaaggataattgcacaaggtacagaattctagtttggtggtttttctctctgaacacattgaatatttcacttagctctcttcttgcttgattggtgatatggtttggctctgtgtccccacctaaatctcaacttgaattgtaataatccccatgtgtcaggggtgagaccaggaggagataatggaatcatgggcgggtttccctcatatctcgtgatattgagtgagttctcaagaggtctgatggttttataaggggctttctccttcgctcggcacttattctctctcctgctgccctgtaaagaggtgtcttctgccatgattgtgtttcctaaggcctctccagccatgtggaactgtgagtcacttaaacctcttttctttataaattacccagtctcaggtaattcatagtagcatgagaacagactaatacaataaattggtactgggagtgggtgctgctataaagatacccaaaaatgtggaagcaactttggaactgggtgccaggcagaggttggaacagtttggagggctcagaagaaggcaggaagatgtgggaaagtttggaacttcctagagacttgttgaatggctttgaccaaaatgctaatagtgatatggacaatgaagtccaggctgaggtggtctcaggtggagatgaggaacttgttgggaagtagaataaaggtgactcttactttgctttagcaaagagactgatggcattttgtccctgtcctagacatctgtggaactttgaacttgagagagatgatttagggtatctggtggaagaaatttctaagcagcaaagtgttgaagaggtgacatgggtgctcttaagagcattcagttaggctgggcacagtggctcacgcctgtaatcccaacgctctgggaggccaaggcgggcagatcatgaggtcaggagattgagaccatcctggtcaacatggtgaaactccatctctactaaaaatgtaaaaattaggtgggcatggtggtgcacacctgtaatcccagctactcgggaggctgaggcaggagaattgcttgaacccgggtaggtggaggtttcagtgagccaagatagcaccactgcacaccagcctggtgacagagcaagactccatctaaaaaaaaaaaagcattcagttgaggcggtttgcagtggctcacgcctgtaatcccagcactttgggaggctgaggtgggcagatcacctgaggtcaggagttcgagaccagcctggccaacatggtgaaacctcatctctactaaaaatacagagaaattagccaggtgtggtggtgcatgcctgtagtcccagctacttgggaggctaaggcaagagaatcacttgaacccgggaggtggaggttgcagtgagtcgagatcttaccactgtactctggtctgagtgacagagtgagaaccctgtctcaaacaaaacaaaacaaaactcataaaggctgggcaaggtggctcacatctgtagccccagcactttggtaggccgaggcaggtggaccacctgcaatcaggagttcgagaccagcctggccaacacatagtgaaaccccatctctactaaaaaaatacaaaaattagctgggcgtggtggcacacatctgtagtcccagctacttaggaagctgaggcaggagaatcccttgaacccaggaggtagaggttgcagtgagccaagattgcaccactgcactccagcctgggtgacagagccagactccatctctcaaaacaaaaaaaaggaacatccagttggggtgggaactggggagaaagacttctgccttctacttcctgccaagatgaaataactaatggaagacagcccggagaagtcatggtccaataagggtgctaggaagccaacggaaaaatcatgaacaggctctcgtgaaacagtagcttgggggcacaagttaatgctttcagggaaatctgcaagtgggacacatccagctgctgtgttgggatcacccagggtgctggggcagaagaccatgagagcttgtctctttatatctacagtctctgtgaattcacagccaaatatctggcagtaggtctagcgttgctgttggtcagcagagctggcaaaaaggagcaacagctaaacacaaagcaagtatgaggacatggagcagggaaaagagcaaggagaaaccagaaccttctgccacatctacgtctgtcgctcatcaccactaacgatgatgatcttcagattgtaatgcctgctgcttcacttcctaggggagaaaaaatgttctttttcctttactcatcttaggttcattggctagagcgtagcaaattagactgacaaaaaacagattaacaagagaaaaacaatttgtcagtgcatgcagtgcacatcgcaaggcagaaaattcagtggtgaacaacccaaagggatggttagcacttggacttatatcacatcttagcaaagaacaatacatttatagataagagttaagacaaagaaaaagggctttaggcttgaacgggcagaaaactatgggaagataaatgtatgggggaaactaatggaagataaggattatttatgcaggtccagctcaactgactttccctcttcttcatggtcatgaaacttccctaggcgagggaattttccagaagtttccacttaaagctgaagagggaagctccaggggaaggctttttttctgcccctgttgattcccatttgcctccagcttaagataatccttttttttttttttttttttttttttgagacagagtctcgctgtgtcacccaggctggagtgcagtggcatgatctcagctcactgcaacctccacctcccaggttcaagcgattctcctgcctcagcctcccaaatagctgggactgcaggtgcatgccactacacctgcctaatttttatatttttagtagtgatggggttttgccatgttggccaggctggtctcgaactcctgacttcaagtgatgcacccgccttggcctcccaaaatgctgggatttcaggtgtgagccactgtgcctggccaaggttaaactttgctaacacatcttatctcagtaggagaatgggaggggatgaaaaggaaagaattggttcatatatacttacaagatttatgataaaataaggaagaaatactcataactataatctcatttctgcaactggtcatgtggtcataaatggtatttataactgccttcttccaccacccattctgcatttcctttgctttctgcaaatatcttggctagtcctgattccttgcctggtgataagatctgaaacttcattcctgaagggtctgttagtggtacagcctacctagttgttgtcattttccatcaacatttatcacatttatggtagccctgagggatctactgcattccagatatattcttccttattttctttgtgtggtcatgacccaatttcacctttcacatcagcatcaatcatcccaacagtgctttgcttgttggttcattagcataaaaagcccaaaataggcacgtggctgtctcaattttcaatttaatggaaccattgttgagttccctgacagaggtattcctcctctaggagctcagacctctggaccaggagagcccaaagttgccctataacttgataggccaagcaacacccagttcatgatgggcagctccagttatatggtaacctggtaactctcagtcaagagtccaggctctaataaggcctgatacccagccagaagttgcttctcaaaagcagaatgaagctgggtgcagtggcccatgcctgtaatcccagcactttgggaggccgagacgggaggatcacttgagcccaggagttcgagaccaacctgagcaacatagcaagcccccatcactacgttaaagaataattatatatttaaaaagggggaaaaaaaggagaatgttacctgtagacggcggcatagcttttctttacattcctaaagggctgtgctaccacacatctgaaaaagcctttcaaagcctccatataagcattcctgtcagccatagacacttctgccagaccataagacacaagtggcagagctacttgtaatgcagcctgggcctgtttcagagccttctcttgttctgggccaccctaaaaaatggcaacaattcagatttctcagcagatgggttgaagtaccacacccaaatatatattacctccagaatccaaaggggcctactaagcattgtgcctctttctgagtggcaggaggggccaatgcagtaatttatcctttacctagaaagggattattgcaacatggcccagcccactggatccccaggaatttcactgaggaggcaggttcatgattttttgttggatttattttctatcctctggcaggcttgagttttactaaagtatccagggcagatgctacatcctgctcaccacgtccatgataccgtggatcagcatgataccccatagaatttagaggtgatgaaggtctctgcacactacgtagagggataatagagccctgacatacaacaacgaagttgtattgctggtcctgctagctgaaagaaaatggcttttggtagtgtttactatcaggtctgggggaaaaaaaaaaaaaaaaaaaaagcacgttcactacatcaatagctacataccaggtggcaggggatgttgatttgcttccgtaaaaagacaaacagaacacagtatctgggacagcagattgcactgaagtcaccacatgattaagtttacaataatccactgtcgttcttgatgatcctttatcttctgaacaaacaaaatatgtgcgttgagtggagtaatggcaggaaccaccatccggcactttctaagtctttgttgatggtactaaccgcttcagtcttttcaggaatgcagtgttgtttttggtttactattttgaaagaggcagttctgctgtcttccatttaaccttttctgtcataatattccttatttcatgggtcagggaactaaattggggattctgtcagttgctgaggctgtccattcccactatgctgtgtggacctgggttcagggacccactaggccaactgtgagatgggcccaagccaaaactccatggatcacttgaccagcatagtctttactctgagccgtattattctgggtctacagtagtcctcaaacgtctatttcctcttcccttgtctccctggtaaacagtcacaagcccttttgggataaggctagaaggccgggcctggtggctcacgcctgtaatcccagcactttgggaggccgaggcgggcggatcacgaggtctggaattcgagaccatcctggccaacatggtgaaaccccgtctctactaaaagtacaaaaaatgagccgggtgtggtggcacgtgcctgtggtcccagctacttgggaggctgaggcaggagaatcgcttgaacccaggaggcagaggttgcagtcagcccagatcgcgccactgcactccagcctggcaacagagcgagactccgtctaaaaaaaaaaaaggctagaagggggacccagattcagattcccttttattcaaggaactggccttgttgaggggagttcaacagactagctcaagtcagaattctcttcaacagatctagagcttttctgtttatacaaatcaagtaaaacttgattttcaaaggctgccatctatttcagtcctagggacagtggaatcaattagctaacaccaaaaatatctacagataagggcccttcaccaaaactcccaaggaggccttctctttctctttgaatgttaattgcatgttccttctttttttttttttttaagacagtcttgctcttgtcacccagactagagtgcaatggtgcgatttcagctcactgcaacctccacctcctgggttcaagtgattctcctgcctcagcctccagagtagcgagggattacaggcgcccaccaccatgcccagctaatttttgtatttttagtagagatgggggtttcaccatgttggccaggctggtctcgaactcctgacctcaggtgatccacctgcctcagcctcccaaaatgttgggattacaggtgtgagccaccgcacccagctggcatgtccctaatttttatttctcttattcttctgcatgcactcgagggcctattgtcactataattgtcacagctccctttccccatgccttgccctttacctcactccatcccatggtaccaccagtcaaaatttgaattgtgacaccactgtatgccatggatcactcatgtcccattcccggcctcccctccaccacctcccatgaggaggttattgagctcttcaagtatgactaacccaatcccagatctaattttaagagtctgtttcccagggccacttctggtaccaattactctatcagtctggatcccaaaaagaaacagatggcgcacttgtaatagcataatttgaagaggacttatgtagcagaacttaacaaagggaggcaacagttaccagaaaatgaggcaagagtcatgtagattcagactcagtaagagacctcacgctgaaggacgaagcagctagagacaatcttgcagggagggaattagaggcagacacactctaattagggaattagaggaccttactgtcttccttcccactgatttcctggggggaatccctggtgagcaaacccaaatggaagccagggaccaaagggaatgttagtgtggttcatacgggccaatctgtggagacagtgagcttagagaacagccctgaagatgtaggcacctgctacactctctattctgtaattagattaatgagataatggaaagacaaccggggaatctaagaatcaatactttcccacagagtctacaaggaagtctgaccttagaccagactgtacagtactgttaagtgattttcatatccgttctctttgctcctctgattgaagacatgtccccccacattcctttatagacagggtagtgcagtgaaagaactgaatttggagacaggttatctgacttgactttttttgttgagacagtctcactctgcccaggctggagtgcagtggcacggtctcggctcaatacaacctcgactcctgggttcaagtgattctcctgcctcagcctcctgaacagctgaatttacagggtgcatgccaccatgcccggctttttttttttttttttttctcgagacggagtctcgctctgtcgtccaggctggaatgcactggcacgatctcggctcactgcaacctccgcctcccgggttcaaacaattctctgcctcagcctcccaagtagctgggattacaggtgcccaccaccatgcctggcttatttttttggacttttttttttttttttagagacggagtctcgttctgttgcccaggctggagtgcagtggcacgatcttggctcaccacaacctccgcctcccaggttcaagtgattctcctgcctcagcctcccgagtagctgggattacaggcatgcaccaccatgcccggctaatttttgtatttttagtagagacggggtttcactatgttgccctggctggtctcgaactcctgacctcgtgatctgcctgccttggccttccaaagtgctgggattacaggcatgagccactgcatctggccaatttttgcatttttgtagagacagggtgtcaccacgttggccaggctggtctcaaactcctgacctcaagtaatacccccacctcggcttcccaaaatgttgggattacaggtgtgagccactgtgactggccaatgtacttttccaatgtacaatctgtaaatctttgaagtctccttaacatttttttttgagacacacacacacacacacacacacacacacacacacacacacacaggatctatgttgcccaaactggatttgaactgcaggtactcaagcgatcccccagacttaaccttctgagtagctgggactacgtgtgccactgggcccagctttctccttaacttctgaatttacttgaactaaattctaattcctattattctaagttactacttattctatatcctccacagctcacttaattgataagaagattttaacagctgcttatcaatcttctccataacatcgcatgttcagctttctgccaaacccaaacaggtcacggattctctcgttttcttccagaaattatagtttcatgttctacttttaggtctatgatccatttcttttgttttttgagatagggtcttgctctgtcacccaggctggagtgcagtggcgcaatcttggctcattgcaaccgccctctcccgggttcaagcaattcttgtgccttagcctcctaagtagctgggactacaggcatgcaccaccacgcccagctaatttttatatattcagtagaggtggtgttttgtgatgttggccaggttggtcttgaactcttggcctcaagttatctgcctgccttagcctcccaaagtattgggattacaggcctgagccactgtgcctggccgtatgatccattttgagtttttatagaaggcacaaggaatgggtgaaagattttttgcaacatattcaatatcacttattgaagactctattttcttcattgaatggcctttgcactgtcaaaaatcaactatatttgtgtgggtctatttttcggctattctgttccatcaatacatgtctatccttttgctaatacgttactgcatctttatattgagtccaaatcaggtagtgactcctccaatttcttcctattacagaattgttacagcataatttgccttcccatataaattttactactttagagaggtctatgttgcccaggctggcctggaacccctgggctccactgatgttcccattttatcctcctgaatagctgggactataggtgaatgccaacacacccagcattccacgttattttatagaatcagcttgtgggtatttacaaaaaagcctattgggattgactggaaatgcattgaccctctggaccaaattggtgaaactcaagatttattcttccagtccatgaaccatggcatctccatttatctaggtctgatttttctgtcagtttattttgtagctccagcatataggtattgcagttgtttgccccttggtatccatgggggttggttccaggattccaccctcccttgcaaatacccaaaccctcagatgctcaagtcccttatataaaatgatgtagtgtttgcgtataatctctggacatcatcttgcacactttgtcatttccagattactcgtatctagtgcaataagtgctacgtagatagttgttatactgtagttcagagaacaagaaaaatctgtacatactcagtacagacccaaccattgtaggcctaacacttttggtctgcagttgactaaatgtgcagacgtaaaacccagatacaggggactgactctattttcttagttatacttaagcatttctttgggtagagaggtagtgagagtgatgtgctcaactttaagtgtctgcttttcccaacttttatttcccaatcttttatttcatcagtggtttgtagttctcagcatatgaattccattcatactgttaagatgtagtatgccttggttttgggggtatgttcagctttacatttgagaacaattgtaggaggtggtaattactgatgtatttggacatattatggaccacatctcccctcttcccaaccgattatcttggttctccatttaggctgtgaaatctgacagcatggtggaacagtatctacaacagatgaaggggctctgaattcaactgggcttcacaggaatgatgggttgagaaatgtctgtttcacagtatgaattacctgagcaaaatgctcagattcctatgcacacagctgctactaaggacataccacacacacatttggagttccagtgggcttttattgagataaattaacaaaaaccaagattttaccatatttttggaaccttataaactcagcagactccggtccatatatgcgtacatacaacataacacatcccaacaaaaacagagccccccccccccccactggaacatctgccaattaagagaaagccaattttcccttcccccaatgtttctgaaattttgagttcccactgttcacttctcagtggaactggtcccttgtggctagggacattggaattctctaccatttttactgaacaaaaaataattttttttcctgtttcaaaaaagggaatagtgactttgttttctccaggctccccttcccacacaaccaatgtaaaatacagcagcctgtatcttaataacccagccctaccccctcccttacccagcattgtctactggagaatttaaatacacttctgttggaatctgtcagctgtggatgggcagagtccaggtgccaggctagctccctctgacctcatgaactgtgacaacctttggacacttaactctttaccccaaagatgagtttttagatcagaaaggagagcagattttctttgggagttttaaaaaactatctttagatttagagatacaaagtacaactacaatctcacagaagtccactaaagttcaccaaaaagctgacttacttcagctctcatgaggccaataattttgataaaggtatctggcaggaaaatgattccacaataacaaatttaaagatacctagaacattgaaaaaaatagcaaattaaaataaatggcttaatttccaagaacttatttcatttttttgttactcatctagaaggtcaggagtgtggctaaaggcagtttctgatgaggttatgagcttccaaagtgtttctaaatccttagtgcagacaccctcccttctggggcaaagtaccctccctcccacccctattaaaaaaaaaaattaaaaaattaaaccacgtcatcagaatgagatgttttgattccaacaatttatactcaaggctttgtgctgagttgtcgtttgaaccaagcatgatgttatcaagcacaaagcacgtggcaaaggaaagatgctcccatctcattctgaaaacaaatactgataaccaagcccaccctccaaccctttggggccaacccattttatgctgctgggaccaacttcaaacaatttagaggtatatttaggtttccctctctcttacttctgtgaaagatcattttagaataaatgtattccattcctatgggagaggcaaaacagtatttatccccatcagaatatatggggaaagaaaaaacataggcctagaggtggtaaggtgtgtaacagtccatagcccattacacaactgtacaaccaaaggctaaatgatgagttggatgtagttttaatattaaaaatagagggtagttctcatccaaatgagccactggaaaatattatcattacttaaaaaaatacatatttaatattggaaagaatgtgaaaacaacttccaatagtaacaatgcttattatgagggcccaaaaaagaaagaaaaaaaaaaaaaaaaaaaaaaagaccaggctttgacctagtcctcagagcatctttccatttaacaattcctattcaagagtcaagcaccaaaactggacagctgcctctacaagaccgtgtccagtagtggtgtcccagatagtttaagtgccactcctcattagaggctatacttcagtaatactttccattttaagtctgtgctttaagagggacccacaggcatgtggcaccacgcagtctaaagttggtgaaggagactgcactttttgtttagtcacccacacgttctctagcgagatacagaattgcatttatactcttttcttctacatgaatgatccctcttatctcgcaagaggtgggggagaaagagagctgcatcggtacaagggcacaatttttttggtcaaaagttgacaccttttaaattccctctcccacccctccctggaaaaaagttacttccttaattaggttttctatttagtaaccaacattgactggacagaaaatatgaggcttgggttccaaatagatgagcttgttcttttttgggtttgtaccgtgcagttcttgctacagttgttaaggagttagggctatgtcccatcaggaggcatctgtaggattttgatctccaaggcaattgtgggtgagtcgcaaatagtttgctcagaagtaggcagagtcaaaaaagcaacttcaagtaattgattcctttgtccaaaagagttaaaacattaaagtatatgcgggacttattttgtaatattttagggttttgaaaaataaaatatggaaatcaattttttttaattttgttttttgcttttttccccccctttccagatgcctcctgattgacctagtacactgggttaaaagggaattaaaaacattaaaaaaaaaagttcactggttttgattcatctcactccttttgcctggagatcaggccaaacatcaagcatgttgggaggggcacaatttaaagcaacactattgactgtaaagcatctgccagcaatttacagtgcaaaatgacaggtaacaattcttgtcacaatgcaagagaatggcaagcagctttctgtagcatgaaagttaacagctctcaggttgcccattcctgcaaaagtttatgtatcaaagcgggcagagggcaacacatttacacactacaggaaatgatccacagaaaattaagctccagaactgctaacattaccaaagctggtactggctaatattctgaaatgcaaatctgtgctttatatatatactgctcaatgacactgccactcaatagaattcctacactgcaaggtagattaatctttgccccctgttgcagagcttgaaatattcctcaaacttttagaaagggggaagaagcaaaatcagagcttctcaaaataaatgttgaattatcaatgttttgaagcttccttgctctctctggtaaacctactccaaaggtactagatgagacagtgtggcagcaaacagtacatcccagatttctgggcccctttactaacacagggtaccatagaaatctgctctctacagcacgaggccaaagtactttctagaatttagtgttgcgtaaaactgagcccctctcatctttagctgctcccataatcactctaatccccttaatcccagcaaccttcatccaaaaaaaaatatatatatatgtatatatatatatatatatgaacccagaaaaaaaacttatttacaaagttatacaagtatacacacccaattttctatgggacacgctttgccacagaggaaagagggccaagctctgacatgtctacacatcaagtgccatactactactggaggcatatgtaacccagtctttagtgtctgctatagagcacaaaggcttgtcatatggctcctgcaatgatagactgctctttcctttgggagcgatgatgttttttatctactcagcccagaagaaatttttacttgggattgtttttttaaatacatgtatttacagtgcggatgaactgcagttgcatatcaactcctccccaaaaagaaaaaaaaaatggtgtttaacattactagtgagtttcaacttctagccctgggctcgagtactgggtagaaagggaagagacttcaacctgaaaccaaaataagaagacattttttaaaagaaaaagaaaaaaaaacggaaagaaagagttactattgttgattcctcgggctgtgtctaaaagatgatattctgaatggtctcatagcataaggcacttcgcacaaataagtaataagctcttcaggcttaaaaaacggatgaggaatcagggagaagttgaaatgcacgagagtcagctgttggagaattttgaaatcattgacaagcttgtgtgttcattaagattcttctctttttagggtttctccccttctcttctttcttttccttccttgtcccctttccccagaaaacattttttaaaaaccagcagttagtgcaactaatgttcagtcagcacacagtgcaaacaagtggaacaaaaaaggtatattccttcttttcagcctttttctcttcaccagttaaaaaaagaaaatgtctgagctcttttaagtcttcatagttccaaaataaaagatgaaaaacccacaaagagaggagcattccccccaaaacgatgtgtcacagatccaaacgagccttttgtaatttgtcaaagcctacagaagaagagaatacaaaattaacattctgaaagcaacacaaactaggatacataggttttcacaatcctcatcccaaatgctcttttctagtagtttctactaaccctgtgcctactatagaatctactggttataggattaaataatttctggtaggcaaccctgagatagattgggggcctgaatgaatgtgaatgttctgatagcaggcagccctcactcgtaacaaatccgggggaaaaaaattaaccttacacaaactgaatactctgccaaagtactagcaaacattggctagtttcatgcttgtccaagagtttgtgtttgatgtttaacttaaggaaaaaaagagtacagagtaatttaaaaattatttaagtaacaattggttgggtgaggtggctcctgccagtaatctcagcactctgggaggctgaggtgggcggatcacctgaggtcaggagtttgagaccagcctggccaacatggtaaatcctcgtctctatttaaaaaagaaagagaaaaaaaatttaagtaacattaggttacttaaataggtaagatgttcacctataacttggaaactatcctttgtcaaatcagattttctttaggaaatactgaaacaacctaccttgcttaaagctgagccttgtttcatgcatttctaactagagcccaatagtcaccaaaagatgatagaggcagggcgtggtggctcacacctataatcccagcactctgggaagccaaagtgggaggatcatttgaacccaggagtttgaaaccagccggggcaacatagtgagatcccatcttaataaaaataaaaaaaagatgggaagacaggttgtccaggaaatcagagtgggtattttatttatgtatttgacggagtttcactcttattacctaggaaatcagagtgggttatttatatatgaggcagagtttcactcttatcgcccaggctcgagtgcaatggcatgacctcggctcactgcaacctctgcctcccaggttcaagagattctcctgcctcagcctcctgactagctgggattacaggcgcccgccaccatgcctggctaattttctgtatctttagtggacacggggtctcaccaggttggccaggctggtcttgaagtcctgacctcaggtaatccacccacctcggcctcccaaagtgctgggattacaggtgtgagccactgagccagcccaagtggctttttttttttttttttttttgagatggagtctagctttgtcacccaggctggagtgcagtggtgcggtctcagctcactgtaacctccacctcccaggttcaagtgattcgcctgcctcagcctcccgagtagctgggactacaggtgcgtgtcaccatgcccggctaatttttgtatttttagtagagacagggtttcaccatgttggccaggatggtctcgatctcttgacctcgtgatccgcccacctcggcctcccaaagtactgggattacaggtgtgagccaccgcacccggcccagagtgggtattttaaaaagatggccatcctcataatctgattaaacatttgctaataaggtattatggatagttttatcagagtgattaatgtacttactagaaattaagagtaaatgctaaaaacattttacattttcagaaatgtaaatactttcatattcaaaactgctggcagtgtggtggctcacacctgtaatcccagcctccctttaggaggctgaggcgggtagatcacttgaggtcaggagttcaagaccaacctggccaacatggtgaaactccaactctactaaaaaatacaaaaattagctgggcatggtggagcatgcctgtaattccagctacttgggaggctgaggtgcaccagaatcgcttgaacctgggaggcagaggttgcagtgggccgtgattgtgccactgtactccagcctgggcaacagagcaagactctcaaaaaacaaaaacaacaaaaatcccccctacaaaactgtcaaaaaaggccaggcacagtggcacagtggcttgcgcctataatcctaacactttgggaagccaaggcaggaggactgctggagttcaggagttctggaccagcctaggcaacaaagcaagaccttgtttctaccaaaaatttaaaacattaggcaggcgtggtggcatgtgcctacagttccagctactcaggagcccaggagaaccaggctgcagtgagctatgattgcaccactgcactccagcctggatgacagtgagaccttgtctcaaaaagaaaaacaaattgctgaaaaacattcttttttgctttcattattttaggactctgaatttaagtactgctaatctaccacattacccgggaagctgcattcaagaacaacatttacagattctcgaatgagactacaacctcccacaagagatattatttactgtcatttatgctagtgggtattttaccctttattgctattatatatggtgtgacatcaaatttcccccaggaaagaagattttgatttccctcatttaaaggttcctcttagctgttctgtcagggacgtacatgcttgttaaggtttctcatcttctacaggctcgctgtggtattctgccacatacaggctcttatcaatgttgctcggaataggtttaatttctgttcccagctgctcctcaatacttttcaggttgaagcgatcatcatatgtgatcaagttgatggctaagccaagatgaccaaagcgacctaaaaaacatgcgtttaaaaattttaatgaataaaatatgaaaatcaatgtgaattgtgcaagtcaagcagtggcaaaaccacacaggattgataatgatgttcagtgccattcttagtatgcaaaacaacttcttaatggtcttcaaacacaggtttccctacaacttcaggtttcgcagcccaaaatagtacttcatttcacctttctcaaatgacaaaatggcagtcaaaactgccataaaatacacattaaacaacagtcacagaacataccacctaatgagtgaagttctcatgtgttaatttcatctcaaattaagcagttattttaacttttcttaataaatgctacagaagaattagaaattagtcttaaataccaaacaactgaattactgttaattcactgttctcatagctactgtactctatttcacaaaagaacaaaatttagtcattacacgcctcaaaaaagaacttctaccaagaatatcacctcttttttcctcacctgatcttccaatacgatggagataggtctctgccagctttgggaaatcaaagtttattaccacattcacagcttgtatatcaatacctcgggtaaacagatcttaaaaaaaaaaagataattttcattttttcaatttagaaatgtctctcagtacaatactaacacatatttctagcataacctaagtttattaatttaattcagttattcaaatgcatttgcacattactggcattacctttcataatcacattatcataaataactttctgctcccaagttacttttttccagtaattgtaagcaagttttaaaaaatgtgtctaaaagaggctgggtgcactcaagcctgtaatcccagcactttgggagaccaaagcaggaagatcacctgaggtcaggagttcgagaccagcctggccaacatggtgaaatccctgtctctaccaaaaatacaaaaattagccgggctaagcggtagcaggcgcccacaatcccagctacttgggaggctgaggcaggagaatcacttgaacccaggaggtggaggtttcagagagccaagatcgcaccactgcactccagcctgggtgacaaagattccatccccctcccccccccccccaaaaaaaagacagagatgaggtatgagtgccagagtaagtcttctaaagtttcagatatggaacccagtatcaggagctgacaagagttcattttcaacttcagaaatcctagaagtagtggtagggtgtgtcggactatgtcacaggttgcactatgtaatatgaacagagaaagcaaaaaacaacttgggagaaaaacactgggtaaaggaaatacaaaaatacttaccagtgcaaacaagattgcggcataagccatttcggaaatcatgaaatacacgatttcgatgttcctaggagaaagcaatgtattccatttgattaacactcatatacagccccaaatttcccataattatttctcccagacgatcagttctacccaaaatctgtttataagtgatccatgatattaagctgctttcaaaaccaaatgagttaagttcttgatatcttcgtctacagaaactgtttacttacgaaatttcataatgtagttaacaaaaaagtcatttttgttacagttttaaattattttttgctaaatcaaattctgaaatttagatattgtatctttttctaaaggcaaacagtaaagaaaaaaagaaaaatcagccagctgaggggccatatttaaaaatccagagcagtgctgtccagtaaaacttctataataaaggaaatatttgtgtctgtacttccaattccaatacactatccagtagcaacaggtgcctaactgagcacttgaaatgtggctgtgattgagaaactgactttttattttaattttaactgatttaaattgccacatgtggctatttactgtattaaacagagaattaaacatggaaaggaagggaagaataaaattttacatttgtatcatgcctgacagcttccaaagtactcatttaaacatttatcttaattttcctaacaaccttgtaagttatgaatatgtactattatccctattttattgctagaaaattgaacctgagggaggtcaaaatgaaaggtcctttggctactaaggaacagtttattcttaaactcaggacatttaaaagaacattaaaacaaaataaagaaagagatttcttattaaatttgtgcaagttctagttttatactcacctgcctcattttagcatgaatatagaagcaagaataacccagttgagaaatcttcttggctagcaattcaactcgctgagaggagttacagaaaatgatcgactggtttatctgaagctgagcacagaaaaaaataagtatgagaaaaataaaaaaaaccttcatttggtttgccaaatcttgaaaacacgaaccagcaaaaaagaaacattaacatggtctaaaacttagaatctcatgatatgagagagatggtaaattgtaaaaattgtaaataatagatggaagataataatatctaagatttaccgtattagagtatatttcttaagggccacataactgtcaacaagagtaatacaattgattatctgattcaaagtagttatgttttatgtgtttccatttaaaaatattttattttattttttttttgtgaaatggagtttcactcttgttgtccaggctggagtgcaatggtgcaatctcagctcactgcaacagctgcctcctgggttcaaacaattctccagcctcagcctcttgagtagctgggattacaggcacccaccacaatgcctggctaacttttgtatttttagtagagacagggtttcagcctgttggtcaggctggtcttgaactcttgacctcaggtgatctgcccacttcggcttcccaaagtgctgggattacaggtatgagctactgtgcccagccaagaataccttctttaatatactcacaaccaatgccaccagcattgggcagcacttcagcaccatgtgtaggggccaattaaaactgtgaaatcagcaacaaaaacttgaaaaacatggcagactgtgaaaaggacccttgttcacagtatgagagctaaacaagaggacagagattgctttcttcgacctcagctgggaatgtgcatgtcaggtgacttaaactctttgccacactgtacacgtccacaaatgactgctgaactaccttgagtattaattccggagttacaaataaattctagtgactaagcaaattcacaaatacagaatatgtgaataatgaggattaaccctagttaaggtcaaagtatttcagaaactattcaaaagtgtatctgtgacttggttaatcatttagtatcaactttaggtcaacaactaaacctgccttttaggaaacactatgaattattttttaatctttttttttttcttcccaagacggagtcttgctctgtcgcccagagctggagtgcaatggtgcaatctcagctcactgcagcctccgcctcctgggttcaagcaattctcctgcctcggcctcccaagtagctgggattatgggcacacgccaccatgcccaatttttttgtattttgtagtagagatggggtttcaccatgttggccaggctggtctcaaactcctgacctcgtgatctgcctgcctcagcctccaaagtgctgggaggcatgagccaccgtgccaagccagaaacactacgaacttttatacagtgaagacggtgggaaaattgatgaaatcatctgttttactgggactcgagagataatattcaacagcagaagcctacttcttaccctggagaaaagtgtgttgaggcagtgtactttttggcgctcagttacatatgcgtagtactgggttactcccttcagagttagttcctccatcaggttaatctcatagggtttctgcaaatgggaattctggggggggagcgggaaaaagatgagtcgtcgtcttaaatgaaagcagagttcatctcaaattcaaaatataccctatacgtttctgtccgataaactcttgctgtaagggacgcaactctcttcaaaacaaaatatatgatctgtcattacagaatttcccccctgccaccctgagacaaaatcttgctctgtcacccaggctggagtgtagtggcacgatctctgctccctgcaacctccacctcccgggttcaagtgattctcctgcctcggcctcccgagtagctgggaatgcaggcatgcactgccataacagactaatttttgtatttttagtagagacggggtttcaccatgttgcccaggctggtctcgaactcctgaccttgtgatctgcccgcctcggccccccaaagtgctgggattacaggcatgagccaccatgcccgacccgatagaaataaattaagatataagatctcaaaaatgcagctaagttactacaggttgagtattccttacccaaaatgcttaggaacagaagtgtttcaggttttaaattttttctaattttggaatatgtgcattacacttagtgactgagcatccttaatttgaaaattcaaaatccaaagaacatttccttttagcatcatgttcgtggctcaaaaggtttcaaattctgcagtattttggatttcagtttaggatactcaagctctgttttgtatatagaataataccggaatcaattcagctagcaccaatggctatgtcatcatgacaccaaaaactaagtgaaagatgaggaatttaattaagttactattacaaccttcttaaaaagtcagttaatttacgtaaaacaaatctttaattgatcaactgaagaaagagccaaaggcttgaaataattagcataaagtatattcacagatatgaagatgtaattacaaataaaagcatactcaaaggtcacaggatggcactgattccaagtacagatttatactcaccatgaacttctgtacactaagagggaaagtagcggaatatagtaaaatctgcctgtttttaggtagcgtgagaataatatcctccattatctgcacaaaatcctgtgacagcaacttatctgcctgcagtagaaagaaaagacaattttaaaaacaataaaataatgtctaaggtcttggttaatacatggtcaaagaataaggcatcatccaacaaaagcatccatgaaatgttcctggtggaaaacaataaattctctccaacactgcagagagtcaaatatgcagaagggggcaaaatctataatccccatcttctaggggaaaaaaaaaattctacactacacagacaacctcccccgctttctgtaacagaatttaattaatttatttatttttagagacagcatttcactctgtcacccagctggagtgcagtggcataatcgtatctcactgcagcctgaacttcctgggctcaagtgatcctcttgcctgagcctactgagtagctaggactacaggcacatacctccatgcccagctccacaacagaattttaatgtgatgattctcattaaagaggtagtatggtgtagtgtttaaaagtacgggttctggccgggcgcggtggctcacgcctgtaatcccagcactttgggaggccgaggcgggagaatcacgaggtcaagagtttgagaccagcctgaccaacatggtgaaaccccatctctactaaaaatacaaaaattagctggacgtggtggtacgcacctataatcccaggtactcgggaggctggggcaggagaatcgcttgaacttgggaggcggacgctgcagtgagccaagatcacaccactgcactccagcctaggcgacagggcgagactactccgtctcaaaaaaaaaaaaaaaaaaaaagtaagggttctgaggccgggtgcagtggctcacgcctgtaatcccagcactttgggaggaccaggcgggcggatcacctgaggtcaggagttcaagacaagactggttgatatggtgaaaccctgtctctactaaaaatacaaaaattagctgtgcacagtggcaagcgcctgtaattccaactactcaggaggctgaggcagaagaactgcttgaacctgggagatggaggttgcagttgagctgagatcgcaccactgcactccagcctgggcaacagagcaagactctgtctcaaaaaaaagtacaggttctggagctaaactgccaggttgaaatcttgcctccttcatttctcagctgtgtgggaatgttacagaactactctgtacttcagtttccacaactctaaaattgtaaaactattaaaatttggatgtttacataatgtagtaactactttaccgggatttagaaaaaacttggctaaggccaggtgtggtggctcacgcctgtaatcccagcactctgggaggcttaggtgggcagatcacttgaggtcgggagtttgagaccagcctgaccaacatggagaaaccctgtctctgctaaaagtacaaaattagcccggcatggtggcacatgcctgtaatcccagctactcgggagggctgaggcaggagaatcgcttgaacttgggaggtggaggttgcggtgagctgagatcgcaccactgcactccaagcggggcaacgagactctgtctcaaaaacaaaacaaaacaaaacaaaaaagaaaaaacttgactttcaagttatccagccactcctcttcttaaaaattaaacctaaactctggcatctataagacaaaaagctgaattcctatgaatgcctatctattgcatctgaagtataaaacgtattttataagcaaattagaagttggatgtctacatactatagtaactacttgacaggatacctaccttataggtttcttgtaaaaattaaatggaaaaaaaaaaaaaaaaacaaaccatgtaaagcacttagtgctggtacccagtgattaataaatgttctctctcattacttaaagataaaagtctgatttgaattaaatcatgttacctaaaacacaaaccaggccgggcgtggtggctcatgcctgtaatcccagcaatttgggaggctgaggcagtaggatcacctgaggtcaggagttcgagactagcctggccaacattgcaaaaccgcgcctctactaaaaatacaagaattagctgagcgtgggtggtacataattgtaatctcagctactcagaaggctgaggcataagaatcacttgaagcggggaggcagaggttgtagtgagccgagatcacgccactgcactccagtctgggtgacagagtgagtctgtctcaaaaaaaaaaaaataataataataataataaacctcaacccaaatgtgaaaataacctcatgtcaaaacattaacaacgctgatcactatagatcctccttgacttacaatgggattatgttctgataaattcatcctaagttgaaaatattacccaaacctactgaacatcatcgctcagcctagcctcctttaaacatgctccacttaccttagcttacagttgggcaaaatcacctgcaacgccgtatactgtagagtatcggctgtctgccctcaatcatcatgtggctgactgggagctgcagtttgctgctgatgcccagcatcatgggagtatcatatagcatattactaaccaggaaaaatatcaatcttaaaaattcaaagtacagtttctaatgaaagcttatcacttccactgaaaaactgtaaagtgaaccatcttaagtcagggaccatctgtacatgtacaaaacatggctagatcccaggactacagattttaataagtttttaaaaggcatttataacatggtgagataatacatgtaacagagattaaaaaccaaacagtacaaagtagtatgcacaaaatgagaagagacaatatatattatatgcttttaaaaattaatcacagagcagaaagagacttagaataaatttggcattgaggttattcactcctctactaaaaaattaaaacctaatgtctgctatctctaagaaaaagacaaaatgctgaattccaatgaatgcctataatctactccctctgacgggtaaaacacattttataagcaaattaatttaaactgattgtttatgtgtttattagatcataaacacaagcagcttttgcttcattcactggcagttataagcaaagcacagaaaagtacagaacagtataatgccaaatgaagagacattacctcatccaatactatcatctggacatgatcaacctttgctactcctttcttaataagatccaggattctcccaggggtagcaatcaccacgtgcactatgcaagatttagaaaacatacattctcattaattttaatttgagcaaagaggataaaggtttataatattacagtcctgagctgcttaatgataattctgagaaatgcattgctatgtgatggtatagcctactccattgtatagctccattataatcttatgggaacaccgacatacgtgcagccgtcactgaccacaacattgtatgcagcacatgactatcttttattagaaacaactaggccgggtgcagtagctcatccctgtaatcccagtactttgggaggccgaggtgggtggatcacatgaggtcaggagttcgagaccagcctggccaacacggtgaaaccctgtctctactaaaaatacaaaaattagctgggtgtggtggtgggagcctgtaatcccagctactcaggaggctgaggtaggagaatcgcttgaacccaggaggcagacgttgcagtgagccgagatcacaccactgcactctagccagagcaacagagtaagactgtgtctcaaattaaaaaaaaaaaaaaaaagaaagaaagagaagaaacacattgtgttatagaggtggaaataacacaaaaaggcacaaagatgtgttttaggataaagacttccatttcaccacaggatgcttaaaaaatatttgtttcacctctacattgggtggggtacagcttcctaaatcacctgctgctttcaacagtaggcatactttcttgtcttaggataattctcaattaatagcagaaggcacaccagacttctgacataagagcaatgcctctaatctagagcagtgagccgagtattgttaaaaggatcaaacaagataattttttaaaaacctatgcaatacaaagaatgtatcacataattatcatatataatattctaactaaaatcaagatataattttatatgagtgatctcatcttgctgttttgttacctttttccactcggcaatgtatcatgaatcctcttcatgaaaatgaatacaggtcaactttactctttaatgactatgtagaatcctattcagattataccttaacgtatttagttagccaatctccttctaagttggccaatttttcggcacgacaataccaccccatagcaaacaactttgtacctacagccctgcatttacccaacttttttcttcaggaaagattcttaaaaatatacatttatggccgggcacggtggctcacgcctgtaatcccagcactttgggaggctgaggcaggtggatcacgaggtcaggagatcgagaccatcctggctaatacggtgaaaccccgtctctactaaaaacacaaaaatttagcctggcgtggtagcgggagcctgtaatcccagctattcaggagactgagacaggagaatggcctgaacctgggaggcggagattgcagtgagtcaagattgcgcctctgcactccagcctgggcaacagagcaagactccatctccaaaaaaaaaaaaaatatacacacacacacacacattatatatacatttataattttaaaatatactcccaaattgcccatgatagagatgtaagtttacacccccacatttacaatgtagcctatttgtccacaaactcacattatcgtctactaatacttttagctttaccaattaaacaggtaaaattattataaacttgctgttttacaattactaataaagtcaaatatcgttttcaattatggtaatttgtctttttcgcttgaatgcagtggtcatttccttttcttactgcagtatttctgttccttaattcttaaaaacaatttttaataatttactgaaatacttgtgactaaaataacagagagctacactaccttttagtaatcatttcttacctgtatcatcaagcctcattatgtcatctcgtaaattggttcctcctgtggttgccatcactttggcccctcccatgtgtttgctgacctggatgcaaatttgactgacctgtagagcaagttctctagtgggaacaatcaccattgctgaaacagtatcaaggaatatataagaaaatatggggtgaggtgggagaacatgctatacatcattatttacaaaatttaagaagctatagaaatactgcgccttatgatgcagtggctcacacctgtaactgcaccttatgatgcagtggctcacgcctgtaatcccagcactctgggaggccaaggtgggcagatcacctgaggtcaggagttcgagagcagcctgaccaacatggtgaaaccccatctgtactaaaaatacaaaaattatccaggcgtggtggcacgcacctgtagtcccacctactcaggaggctgaggcaggagaatcacttgaacccggaggcagaggctgcagtgaggcaagatcgcgccactgcactccagcctgggcgacagagtgagactcagtctcaaaagaaagaaagaaaaaaaaaatagcctaggcacggtggctcacacctacctataagcccagcactttgggaggccaaggtgggtggatcacctgaggccgggagtttgagaccagcctgaccctatctctactaaaaatacaaaattagctgggcgtgggtggcacatgcctgtaatcccagctacttgggaggctgaggcagaagaatcgcttgaacccgagaggcagagattgtggtgagccgagattgtgccactgcactccagtccaggcaacaagagcgaaactccgtctcaaataaaaaaaaagaaaagaaacactgccccttataatctagataccgagatgtattaaaaaattgggctgggcagcacagtgagtaactcatgcctagaatcccagcacttttggaggctgaggcaggaggatcgtttgagctcaggagtttaagaccagcctgggcaacatagcaagaccccatctctactaaaaaaaaaaatgaaaaaaattagctgggaatggtggcatgtgcctatagtctcagcttctggggaggctgaggcaggaggatcacatcagcctgggagattaagactgcattaagctatgatcatgacaccacactccagaatgggtgacacagcaagactctgtctcccccgccaaaaaaattaagaaataaaaataaaaagttgaatcattacacaggacattatgaaaactcaaatgtacaaatctctttatgaaaagagaacctattatagtgtcccagatttagactctccctcagcaatactattatataaatattaaactcttcctcttcttttttttgagatggagtcttgctctgttgtccaggctgaagtgcagtggctgccatctcggcccactgcaacctctgcctcccaggttcaagcaattctcctgcctcagcctactgagtaaccgccaccacacccagctaattttttgtatttttagtagagacggggattcatcatgttggcccagctggtctcaaacccctgacctcaagcaatcctcctgccttggcctcccaaagtgctgggattacaggtgtgagtcactgcacctggccttctgctgctgctgcttcttcgttttgagacagatctcgctctgttacccaggctggagtgcagtgacatgatcttggctgactgcaacctccacctcccaggttcaagcaattctcctgcctcagcctccttgagtagctgggactacaggcacatgtcaccacacccagctaatttttgtatttttagtagagacagggttttaccatgttagcgaggctggtcttgaactcctgacctcaggtgatctgccttgcctcggcctcccgaagtgctgggattacaggcgtgagccaccacacccagccaatactgttcttaattacaaactttcagcatgttgagttcgcaactattagctcaaagtttattaacaatatttctaaaagccccaactacatttgagtcagattcactgtgtaaaatacctaggtaggaaactcctgctacctaggctctatttacatcatatgaaagtgggaagaaaagataattacagatcacgaaagctaaaaatgtaaagtttcagagatgaaatcttaattccattaacttacattgaatataactatgaaaattttttattccccactgcctaggctcttaaaatcccaaaatccacagcctttaaacagaagttcatgtttctacaaggaattctgttaacactcatctgccacaagaaatagttccatagtttataagtagcaatgtcaactaatttaacttctcatgacctcagccgcctttttttttttttttttttttttgagttgagagtctcactctgtcacccaggctggagtgcagtggcacaatcttggctcactgcaacctccacctcctgggttccagtgactctcgtgcctcagacttctgagtagctgggattacagttgtgcgccaccatgcccagctaatttttgcatttttagtagagacagggtttcgcaatgttggccaggctggtcttaaatatctggcctcaggtgatccacccactttgacctcccaaagtgctgggattacaggctgtgaggcaccgtgcccagcctcagctttcctacctatagggcactaatacttatttttcctgtctcactggaatgctgtcacaagtgtgtatcatataagaatactcttaaaactagaaatctctaaaaagctgggaatcatttttaataaaaagaccatcatcaggctaaaaaaagaaaaaacctgaaaagaaagaatacaaattttagataatgtaaattctgactaaaaaaagagtatcttctacacatggctccaaggctgaaactcccatttttagtttaaaaacaaacttttattcaactaaccttgtatattgtccttcttcaggtctagccgttcaagtaagggaatgaggtaggcaccgctcttgcctgttccattttttgctctagctaagatatccctaccagataaagcaatgggaatgctctcctcctaaaagagataagacaatacaaaattacttctgaatgtagtacacaagcaaattcctctctgaaatacactgaaggatacctctttcggtattgctttaagtgtcctaagtatcctacatttgaattctcacatgaatagcagagatccaagtaaatcagcacgaccagtcaacatcaacatcattataaaccagtatttaccagaactgctcacagaattttaaattgtaacccaatgtcataagaactgtgatatgtgtgtatctgaagagaacaacaaagaaaatggaggaactcaggctgacccataaatagcacttgaaaatacagacaaaacaaaagcaaagcctccttcaaataaaaattggaaaaatggccaggcacagcagctcatgcctgtagtcccagcacactgggaggcagaagtgggggatcacttgagcccaggagttcaacaccagcccgggcaactaggcaacatggaaaaaccccaactctacaaaaattacagaaagtagctgggtgtggtggtgggtgtccataaaccttgagaggctgagccaggaggtcaagggtgaagtgagccatgattgcaccactgtactccagcatgaaagagacctcgtctcatctcaaaaaaaaaaaaaaaaaaaaaaggctagatacagtggctcacatctgtaatcccaccattatgggaggccaaagcaaaacgatcacttgagcccaggagtttgagaacagcttaggcaaaatggtgagaccccatctctacaaaaatttttaaaggaaaaaacaaaaacaattccaaggtaagactatatatattttgagactagcacaccaatttgaccacagtgaaaaattgtagcttggacacctcatccctgcaacaaaacacgaataggctgggaaagtttaacctcaggtcctatttgtcatttatttatataataagtaaatctccaatgtctgtcccacagcctacttctctgttctgtaatgtgctctctattgaaggttcaattctattgcagctacctcaaatacggtcacatcactaaaggtgacctctcattttaatatttggcttactttgttatctattttgcaaataataacagtagttcatactaacttaaatttcccagacaacagcaaaggattcccaaaagttacttaaaaataaatagacatatacaaagagaggtcaggagttcaagaacagcctgggcaacatggcaagcacccccactctttgcaaaaacaaaacaaacaacaacaacaaactataaaatacaatagatcgttgaaaaagcttgatcgttgaaaaattgttaaaaggaaattatgtggaatttttttttttgagacagagtctcgctctgtcgcccaggctggagtgcagtggcacaatctcggctcactgcaagctctggctcccgggttcacgccattctcctgcctcagcttcctgagtagctgggactacaggtgcccgccaccacacccggctaattttttttttgtatttttagtagagacggggtttcaccgtgttagccaggatggtgttgatctcctgacctcgtgatccacccgctttggcctcccaaagtgctgggattacaggcgtgagccagcgcgccgggccatgatgtggaattttaattttttttcttttttttttgagacagagtttcgctcttgtcactcaggctggagtacaatggtgcgatcttggctcactgcaactttcgcctcctggttcaggcgattctcctgcctcagcctcccgagcagcttagattaacggcgtgtgccaccacacccagctaattcttgtatttttagtagagacggggtgtttcaccatgttggccaggctggtcttgaactcatgacctcagatgatccaccgacctcggcctcccaaagtgttgggattacaggcatgagccactgtgtctggcctgaatttttaatttctaaaactaagatactaggaaccaaattcacagtcactgacatttgtcccttctatgcctgggctaacgacaaaaacaaacaaacaaacaaaaaacagctttagccctttaaagctgctattggtagaaatgactaaataagcaggatgacttccatctcccacgacaacactctttctacctagagctccaatcacaggatataaatgggttccatatggtcagaacaacacagctgccagaacaactgtgaaaatattgttgttggctgggaacgatggctcatgtctgtaatcccagcactttgggaggctgaggtaggcagatcacctgaggtcaggagttcgagaccagcctggccaacatggtgaaaccccatctctgttaaaaatacaaaaatggtcatggtgcgcacctgtagtcccagctacttgggagcctgaggtaggagaactgcttgagcccaggaggaggaggttgcagtgggccaagattgcgccactgcactccagcctgggcaatggagcaagactcagtctcacaaaaaaaaaaaaaaagagagagaaaagaaaagaaaatactgttgtcttgttcttacagccagcattaaagactctgcttattaaggtaaagcaaacaaagaagaaaaccttggctttaaccctttggtcttaaatttcttccctcatcacagataagtgaaccattatttccagttgttccagaggctcccattaccctgtcacctcaggttttctcttttgtggttctgtggtgccagtagtctgtagtttttaacaggctgcctgcacactactcagttttacagtattgaaaaagtaagataggtggtctctgatggtctcataacgacttgctgggtcaggttctttaaagtgtaaacctttttttcaatcaagtgaggcagaacagaattagactagaggtatcctaatcccccttttcagttcatcttttgactgacttgattaaggccattgacttctattcctttgccctctttgacagggattataccctacaaaaactgttcaaggataaagctttaacaaagtacatgtgatagactgtaagttaagacaccctgatattttgccttatatgatggccattatgattaacagtcagtgaattcagcacatccacactgcctcttaccagtgtttctcaggaaataatgaaaagcaagagaattcaagtcaagttcaaaaagctgtgaaatacaagaggaaattatgaggaactgccagggagaaggcaaaggaggaaggaaacgaaaactttttttaaaacttactatgtgctcagcacaactttcaagttaggtactttgttttacaactgacaaaatggatcctaaacaggattagtttgcccaaggtcacaaagcaagaaatgctttagccagtatttgaacttagatctgcacataacatgtaggcaagaagttggagaaaatggaactctcatacactgctagtgggaatgtacagctacgctggaaaccagccttgcagttcctcaaaaggttaaaaagagttaccatatgaactagcaattctaggtatacagcgaagagaaataaaaacatctccacacaaaaacctgcacctgaattttcatagcagcattatccttaatagccagttccttctatgtttttttttataatagtacaaactttattcataaataaaacttcataaggttaaagcagggtcagttcctattttaaaaagggaacaggggaaggcagcctgctattttatttaaaatcacaagttaggtttttcagacggatgacagttgagatcattaaatccccttcctacttctcagattttcacaaaatagcacattaaatcctcagtccttggaaaacaaccccaaatgtctaccaactgatgactggataaatcagaagtaatagagccatacaataaaatattattcaggaaaaaggaatggaatattgatacaagctacaacacagatgaactcggaaaacattacgctaagtcaaagaagccagtcacaaaaaaaacacatactataggattctatttatatgacatgtccagactaggcaaagctagaatgacagaaagtataccagtggttgtttaggggtgtgggaaaatgaggtgtgactgctaaaagggtttcttttgtgggactgatcaaaatgttctaaaatttattgtggtaatggttgcagaactctaaatgcactaaaaagcattaaattgtatacttttgatgtgtgatgtcatttatatctcaataaagctattacccccaaaaaacaaaaccccaaaaaaccaaccccacaagcttagggctgacatctgccaccttaggtctccaaattcacattcactgtaacgtttagataatgactgaagagtatttgttgtgttttggttactctagtatccctttactaagtaacaccccaatttccttctaaggaattacatatgccctggtctcccctgtcccaacagaccaagcctcaccaattttctaagccaagtggtagacacatagcccacactgggccagcggaatgttgcctcctaagaatctaaattgttatagtgcatccattacagcttcctaagtccttcagagctatctcaattcttagtcatttccaagtatgtttctctagccttctcaatcttgtgaattcccgttatttttccaataaatttccttttgcttaagttagatcgagttggtttctgatgcctataattaaagaatggtttattttccaatctcctagcattgagaggcattttacaaaagtgtggtaccaacaaaagctcaacatcacccaactagctgcatttacactgactgcttcctcttattttccaaaccttaatttccaagagggaaaaaaaacctatggttaaaggccgggcgcggtggctcacgcctgtaatcccaacactttgggaggccgaggtgggcagaccatgaggtcaggagatggagaccatcctggctaacatggtgaaaccccgtctctactaaaaaaatacaaaaaaattagccgggcgtggtggcaggcgcctgcagtcccagccacttgggaggctgaggtaggggaatggcgtgaacccaggaggcagaacttgcagtgagccaagattgcaccactgcactccagcctgggcgacagagcgagactctgtctcaaaacaaaataaaacaaaacaaaaaaacaacctatggttactccagacgaggtagcaatgattgttacaaatgtcccctgcttaacaggaaaaaaaaaaagggagatggtaatttctaattatatctctaatttaggctggggatggtggctcacacctgtaatctcaaccctctgcaaggctgaggcaggagaactgcttgaggccaggagttcaagaccagccagtgtgacaaactgagactctgtctccccgaccccacccaaaaagaaaacaaaacaaaacacacaccaaaaaaaaaaacaaaacaaacaaacaaaaaaaacctttgagtttttaggaaatatttttttcaatcatgataaaccgattgttagcaggaagaatgacttatttacaggattcagaatgctataattcctaactataaatagtaaactattaatcctcattagaccttagctgacctggcacaaaattttgttgccaacagtacggagcttccatgtttccctcaataatcaactacttctcatttcttcaccttcttagagtttcgaaaaagtcttcaagaggtgttcccagggtttagaagcaacgagagaggccatctttctcaatcataaccccaaagttaatataaagtttcaaataatgctaagcagacaaaaacagtatattcttaagccttccaaagaagtctaggttcctataaagctatacctttagaatggcaattattctactggccacagcatccagacctagaactggtcacagatggctctagaaatacgttgtgggagcaatctgtagtatatctggttccagcctgtcaatgtaaaagctcttttgagagcatataattttaagtgcctaattctctaacagtcttttttttttttttttttttgtgagacagggtcttgctctgttgcccaggatggagtgcagtgacacaatcctggctcacttacagcctcaacctcctgaacatctaagactacatgtcccccatgcccagctaatttttgtacagtcagggttttgtcatgttgtttaggctggttttgaacccctggactcaagcaatccacccaccttggcttcccaaagtgctgggattataggcatgagccactgcacccagccaattctccaaatctcacagccaaactgcaactaaattccatctcaaacaaatattcaaatgcagaagactcacccatctaatcaaggcagttttaatatttaggggaaaaaaaatgcctggataaaactgtaaaaccaagcatgatagaagagatacttttaggaatgggggagggatgacaaaaataaaacgagaaggtagataagaatggaaagaatactagaagacagcctgccatgaggttatattttaccaggggggtgatgggtgcacccaaatctcagaaatagcaactaaataatttacttggccaggcgtggtggctcacgcctgtaattccagtactttgggaggccgaggagagtggatcgcctgaggtcaggagttcaagaccaacctggacaacatggtgaaaccccgtctccaccagaaatacaaaaatcagccgggtatgctggtgcccgcctgtaatcccaagtcacttgggaggccgaggcacgagaatcgcttgaacccgggaggcagaggttgcagtaagccgagagcacaccattgcactccagcctgagcgacagagcaaaaccctgtctcaaaaacaaaagaatttactcatgtaaccaaacaccacctgttcccccaaaaaacctatgaaaataaaaatttaaaaaatttttttactaggggatctgtaaattttgtttcggttctaaaatcctaatatttgtgacttgtaactctgattgattctaagaaacacataatcttgtgctttccatggatccccaggacaaaacaataggaaagaaaaaggcaataaaaaaaaagaaaaaggcaatacaagtggtgaccttgagtatctaaaacaatatactcatacaataccttgctatttcaaaatactttggttgtacactacatttgatcttaacaataaaaatcctgtgagggagagtacttatttctactttacagaaaaagctggatgtcagattggttaagtggctgaagagttaattgcctatatgctataacaacactcagagtacaagtaacaaagttaattttaaattttaatacaaggtaagaaataggagtcagcaaatatccactaagaatgaggactgggctaagtgcagtggttcacatctataattctagcacattgggaagccaaggcaggaggactgcttgagcccaggaggtcaagaccagcctggtcaacatggcaaaaccttgactctaccaaaaacaaaaacaaaaacaaaaacaaaaaacaaccaggtgtgctggtactacactatcatccttactcaggaggctggggcaggagtatcacgtgagcccaggagtttgaggctgcagtgagctaagattctgacactgcatccagcccaggcaacttagcaagactcagtctctttaaaacaaatttaaaacaattacgtctcctaaattaactaatttccttttttgaaactattatataaaataacccataacatttttgagcatttatcacgtactaggcattgtactaagcatgtgaattatctcacttaatctttacaacaaccctatggtattatactattacctcaattatataggtcaggagtctaagacttatagatcccaaataaccaatttatgaaggagtagagctgggatttaatctgggcagttccctacaccaagttcacctgcagacatgagttacctaagtttcatcaaagcacgctaaataagcacaggcactatgctaagtactagagataaaagttgaatgatgcagttcctactgtaaaggaactctcataagacctcagtgggccaggtgtgttggctcacgtctgtaatcccaacactttgggagactgaagcaggcagatcacaaggtcaggagatcgagaccatcctggctaacatggtgaaaccccatctctactaaaacacaaaaaattagccgggtgctgtggtgcacgcctgtagtccccgctattcgggaggctgaggcaggggaatcgcgtgaacccaggagtcggagattgcagtgagtggacatcgcgccactgcactccagcctggcaacagagtaaggctctgtctcaaaaaaaaaaaaaagaaagaaaaaaaaagacttcagtgtagataaaatggcttaacatgaactacatcatagtagattcctaggtatttctaatacctacacccaaattacccctctgatgatgcatatccttgttttgatactttatccagccaaaagcacactctcaactctgggcaatcattacccagcgttctctgcttggaacacagctcaattcttccaggttgtcccatcttcctctaatgactacatacatacgcaattccaactagaaaggtactcatcatattacagtgaattacctgtacaattagctgtcctttccagactgtaagacagcaaccatatatctgtcttattcattatagaattcccaaggtcaaacactttctaggtcactccacacatgttggctcaatgaaaaagtactcagtgatgtcacagggtttgtccttagcacagcctgaattcaatcatttcatcaatttaagtatgtctgttgtcatcatttatcaaactggcctatgtataatgcatgtttatatgtacgtgtatatttatgtgtatgtgtgtgtggatatgtatatacatgcatttatttccttgctctttccactgaaaggaccaagtagcaaacagggtacctaatgcctgggtcttggtccctaatactactccacactaaaaagaatcaaggatccttggatgccaatgctgggccaggataggtataagataagcctgcatcatgatatgtcaaaaagcaagaaaggggccgggtacgatggctcacatctataatcccagcactttgggaagccaaagtgggcgatcatttgaggtcaggagttcaagaccagcctggtctacagggtgaaaccctgtctctactaaaaatgcaaaaattagttaggtgtggtagcacacatctgtaattccagctactggggaggctgagacacaagaactgcttgaacccaggatgggaaggctgcggtgagccaagatcatgccactgcactccagcctctctgacagagctagactccatctcaaaaaagagaaaaaaaaaaaaaaaaaccaagaaagtactcaagaaaaatgaaggggacacatcataaaaacataggaaccaggctgaaagagcttacattggccagatctaggctatttttagaataataataaaaaaaaaattgaaaaaaattgaaaaaaatggtgagtataagtccatactgataacagatatatatggatgaggggaagggaagtttcttctttataggggcaaatacagagggagtgctagaattggaaagtcatcataacccatcagagcagagatgagatcaagcaagaatcaccaatgggtgctaaaactaggggggaaattttgttatttttttaaaaaagtatcatgccatgaattgcaaatcacaagatacgaagttaaatcccacctctaccactcatgagctacaagtatctttggctaagtcaagtttctcaagctcagcactactgacattttgggccacaaaattctttgttgtaaggggctgtcctttagcatccccccattgatgataataaaaaatgtttctacaaattgctaaatgtcccctgggggacaaaaatcctccctggttgaaaacaatacgctaagagaactgctctgaacttttgttttctcatccacaaaacggggataatacctagcctgaacatctatcttactgggttggaggaggagggtggccatagtattattgtatttgtatggtcttaaaatgcaccccagattgcttattcgtctcaagggagaggggaaagagcagtaattatagaagggaaaaaccacacaacatcttgacagggtaatcaaaattaacatcaccaaagaggaataaatggacactaggcacaccttcaaacatgataccctgagaaggccataatgtgatttctgcattattcgggctgagaaagcctaccttgaatctaattacttgggaatatcacaaaatcccaaaacgggaaatgtactattaataaaaaaagggggccaggcatggtggctaatgtctgtaatcctagcactatggcgaacccaggagttttaatcagcctggataacatagcaaaatcctatccctacaaaaaaatagaaaaattagccgggtgttgtggcacatgcctgtagtcccagctactaggaggctgacgcaggaggatcacttgagcccatgaggtcaaggctgcagtgagccgagatcaggccactgaactccagcctgggtgacagggcaagacccagttgccaaaaaaaaaaaaaaaaaagagggatgggggaaggggttgtaggctgtatttttaatatgctgatgtcataaaaagaagaacaaacactagggaaacgctaatgactaaaaaagacataattacaaataatacctgaccctagactggatcctgtatagaagaaaaaaactgctataaaggacatgtttgggtccattaataattagaatgacagatgagatagaagtattttatcaatgttaactgaaggtaactgtactgtggttacgtaagagaatatcctaaagaaatacacaccgaaatatttagagttgtaaaagccatgattttctaatttacccttaaaaatttcagaaaaagtgtgtatacgtgagagagaaatgttagttcactgtatcacttctgcagagcaaaaagaaaactgtttaatggttgacacataaccttacatatgtgataaaaagggttaacatacctgaataggagatggcttttcccagcccatttcaaaaattcccatcagtaactcccgtttcaaacagtaatcttcaaactcatttccttttgtggaggtcacatcctagtcaaacaaaaaggaacaataaaagaataaataacactgttggtaaatttggtgtcctttggtaaatttatctgtgtttaagaaaatttatctgggccaggcatggtggctcatgcctgtaatcccagcactttgggaggccaaggcgggcagatcacctgaggtcagaagttcaagaccagcctagccaacatggtgaaactccaactccacgaaaaatacaaaaaattagccagggtggtggtgcacgcctgtagtcgcagctacttgggaggctgaggcaggagaatcgcttgaacccaggagacggaggttgcagtgaggtgagatcgcactcactgcacagcctggggggacagagccagactctatctcaaaaaaaaaaaaaaaaaaaaaaaaaaaggaaagaaaacttctctgactttagtactttacctgcccaatcttaaatataaatatatgcagattacttgttttaatctgtatttcaacttttcctgaagaaaaaccactgtccctgctttgacacacaagctttttaaaaaactatgttttggggaaagagcacttggtcatagccttctttttttcttcgagagatggagtctcgctctgtcacccaggctgcagtgcagtggcgtgatctcggctcactgcaacctctgcctcccaagttcaagtaattctcctgtctcagcctcctgagcagctggattacaggcgcacgccaccacacccgactaatttttgtatttttagtagagacagggtttcaacatgttggccaggctggtcttgaactcctgacctcaggtgatccgcctgcctcggcctcccaaagtgctgggaatacaggcaagagccactgtgcccggcccttggtcacagtctcctaaggactggtggaatagtgttatttttttacacaaatatcatgccatgaattgcaaatcacaagatatgaagttaaatcccacctctaccactcatgagctacaaatatctttggctaagtcaaatttctcaagctcagcactactgacactttgggccacaaaattctttgttgtaaagggctgtcctttagcttcccccctattgatgataagcaaaaatgtttctacaaattgctaaatgcccccgggagacaaaaattctcccggttgaaaacaataggctaagagaactaactgctgagcatttgttttctcatccacaaaatgggaatatatagcctgaatatctatcttactgggttggaggaggagggtggcagtggtgttatggtcctgaaaccaattccctccagataccgagggacagctatacctcacttctagttccccaccattattctacttgtattttacaaccaacttaccgaagttttgattcttagatcctttggagggagttttaaagtctttttccagtcatcaccaggtctagagagaatacagtaaacttgaagtatcaaaattcatagcatcctaacaaagatgattcatctcaattataattaagtgttaaaaaagcacagtaagtttaatatattccatttaatatatctaacaagataattaaacaactttagaaaaagtgttcttatagagaatctcaggaggataaaaaaatcaagaacagaagggattaaggcatccatcctcttaagcaatattgtatacagtgtaactgttgtcaaaaggtgttttgtttgacctacacagcatgtgttttaatttaaatgagtttaaattagttctcaacatttaaaaactgtaagattttatatatcttatataactcctgggctcaagaaatccacctgcctcggcctcccaaagtgataggattataggtgtgagccaccatggccggctattctcatttttaaaataggttaacaggccaggcgtggtggctcccatcagtaatcccagcactttgggaggccaaggtgggcggatcacttgaggtcaggagttcgagaccagcctggccaatatggtgaaaccccacctctactgaaaatacaaaaattagccaggcatggtgggacacaactgtagtcccagctactcgggaggctgaggcaggggaatcacttgaacctgggaggcggacactgcagtgagccaagctcacgacactgcactccagcctgagtgacagagggagactctgtctcaaaaataaataaggtgggcgcacacctgtaatcccaacactttgggaggccaaggcaagcggatcacctgaggtcaggagttcgagagtagcctggccaatacggtgaaacccactctctaccaaaaatacaaaaattagccagccatggtggcatgtgcctgtaatcccagctactcaagaggctgaggcaggagaattgcttgaacccgggagccaagatcctgcgccagagcaaggctccgttccaaataaataaataaaacaaaataggttaacagttacatcaaacaattgatataatgcactcagcacagtgcctggcaaaataatagcacagtattagccaatgagcatctcttaatctttcttttttattggaaatgctagaaatcatgaaagagaataaaaacaaggagaatataaataaactctctttttggccaggtaaaaacctcaagtaataaatactcaaagcatctttaaaaaaaaaaaaaagatcagggaacatctgcagacaaagtatttaactgtgacatcttcgaaaaagttttcactgcagctgttcttacataaccagagtccccaaaacatctcaaatgctccattcacagacaaaaagaccacttattttacttaaaactaggtcctacataatgcatactctaacattggtaactttttgctaccaattccaagactactactgtactaaagccttttttttttttttctgagatggagtcttgctatgtcacccaggctagagtgcagtggcatgatctcggcttactgcaacctccacctcccggggttcaagcaattctcctgcctcagcctccagagcagctgggattacaggagcttgccactacacctggctagtttttgtatttttagtagagacggggattcagctggtctcaaactcctgacctcgtgatcctcctgccttggcctcccaaagtgctgggattacaggcgtgagccacctcacccggcctactaaagcctttcatctaagcctgtatcatcgaagtttctgatgtcagtttgacataccgttgaattcaacaaaatagtgaataataatgcgtaagatacaatgcaaaacctgaccacaagaaatttataatcttatgagatgaaaaaactatttaaaatgagaaagtaagtgacggaggttaagtattagaagtgttctgagacacttgatgggatctagaggacttcatggaagagagggcagagaaaatgagatttgaagaaccgcagaactgaaaagaaaccattaatcgtaggaaaaccagaaaagaaaaatcaaaatccactgttgtccccaaatcagaatttattttttatttctttgagatggggtcttaccctgtcacccaggcttgagtgcagtggtgcgatcatagctcactgcagcctttattatttgtagagacagggtcttgctatgttgcccaggttagtctcaaactcctggcctcaagtgatcttcccacctcagcctcccaaagtgatgggatgaacggcatgagccatcatatccagccccagaattttttaaatagaaaatattctcataggccaggtgcagtggctcacgcctgtaatcccagcactctgggaggccgaggcaggcagatcacctgaggtcaggaattcaagcctagcctgcaaacatgatgaaatctcatctctactaaaaatacaaaaattagccagacgtgatggtggacacctgtaatcccagctacttgggaggcagaggcaggagaatggcttgaactgaacccaggaggtgcaggttgcagtgagtcgagatcacaccattgcactctagcctgggcaacagagtgagtgagagtccatctcaaaaaaaaaaaaaattaaaaataggctgggcgcagtggctcacatgtgtaatcccagcactgtgagaggtcgaggtgggcagatcacttgagctcaggagttccagaccagcctgggcaacatgacaaaacgccgtcgctactggtgcatgccagtagtccccactatttgtagggctgaggcaggaggatcacttgagcctgggaagttgaggctgcagtgagccatgatcgtgccaccatactccagcctaggcaacaaagtgagaccctgtctcaaaaaaaaaaaaaaaagttataaaaaaaattaaaaatagtctaaattttgctaacctacttacattctgccaagacaaactacaactgaagtagtattcatttctataccaattaaagcattcaccttaaaaataacagaatatacactaataccaattctcccaatgacctaaccaattctgctgaaaattagttcttagaggtcctagtgaaccacatacggtaactatatgacagtctggtagcttgtataagctatttttctgtaggaagtgaaaagatctaggttgtaataaaacatatacctcagttcagtaacccagtgtcaacatcttataaagattcccagggttaaattattttatatggcaagtttttttttttttttgagatggagtatttctctgttgcccaggctggagtgcagtgacacgatcttggctctctgcaacctccacctctcgggttcaagtgattctcccgcctcagcctcctgagtagctgggattacaggcgcatgccatcacacccagctgatttttgtatttttagtaaagacagggtttcaccatgttggtcaggctggcctcaaacttttgacctcgtgatctacctgcctcagcctcccaaagtgctgggattaaaggcgtgagctaccgcacctggccttttttttttttgagatggagtttcgctcttgttgcccaagctggagtgcaatggtgcaatctcggctcactgcaactccgcctcccgggtttaagtgattctcctgcctcagcctcccaagtagcattatgggcatgtgccaccacgcccagctaattttgtacttttagtagagacggggtttatttttagtagagacaaggtttctccatgtttgtcaggctggtctcgaactcccgacctcaggtgatccgcccaccttggcctcccaatgtgcttggactacaggcgtgtgccactgcacccggacctatatggcaagttcttaacaaaagccaaacatcaactggagtcaagaatcttaaatgttaatttcctataactgaatctttaaagtgatggttaccattcaaatattgtaatttaaactatgcacttaaaagtaacaaatagcctacatactttcagctttaaaagaaaaaatatcctctagtaagaggaggctcttcaattttaaggttaacaaaaggtttctgagactgttcagaactgtgttctgtgagttcaaaattcttagttccctttttatatgtaaaaggaggaaaaaaattaaaaattttttttttgggtagagacagagtctcattatgttgcctaggctggtctcaaactcctggactcaagtgatcctcccacattggcctccccaaagtacagggattacaggcatgagtcacctcaaccagccaacttttttttttttttaaagtaaaaaagctaagttccataagctaaaaaaagttacgagaaaattttctgagtgaataatgcttggagttcagaaggctgggcaagtctttaaagactctaaagactcagactgagtctttaaatttaatacataaagttggctttatctgctgtttaactagggtaaggtgcagtcgtaaaaaaactatactgacaaaaacgagatgactaataattttattcatttacaacaaactaagctaataacttttacactaattatgaaagccagaaatgtttccaaaaaccatttatacaaaatttgtgtgtatcatctgacctcaggatgactacttgctgaacaaattatggcagaaatatattattctattgcaaatacctactggccataaaacaaagtcatctgtcctctatttggaatcaaaatggttaaattaaggcataagtattaatagtcaacaccaaagtaacacaaatcttggttccccacaagtgtttattaataatttactctaacacttacttaatagtggtggtcatactctgtgcttgctgctgagtgccattattgattgtgttggtgtttttcagctggttcatctgttgctgtgtctgtgtgccccctcctccagggccaccagtgggtttcacagggcctctcagctgaccattttgactggacagacccattataacagggttctctgttctggccgtgctcatgctgttttaattgcaaaggtctttcaaacttcaaaacttttgaaagtcagtagagaaactgtaataacagtttattaggctctccaaaatgaagagataaatataagtcttgctcaataaatgagtcctttattgcaatgcaggcaagcacctgtaagtctctgaacggtaagcagcagtaacttgctctcttgcacggaatcaactttttatttttaaaaagccctctaacaagcttgagttatatctgaattcactcacgtcaatctgaaacaaacaaacaaaattaaattagcaaacacaacagaaaaactttgtttcccttttaaaagaacccctttaaaagaattctcatcttttatattaaagaattaataatacagctacacttagaccaaatcacgagccaagctaggatagacacaactttgaactatctcaaaaacacaatgaggccaatatcaaacatttaaaattgttaattcaaagcaatccagagattaagtagaaagagactagtaaattagcactactcgtcaatgataatctcttctcttcagtttcctccccatgaattctctaagtctctgacatctctaaaagtcagtgattcattatacttaattgcattacaactcactgaagtatcacacaatttaaacaagacaattcattaattttcttctacttgtaatagcaaccgagagtccttatagatttaagtgagcttttgacttgaacttcacacttccagaaaaaaacacctttgtgcccttacaaatttcaactattaaactttatgggctgggtgctggtggctcaggcctgtaatcgcagcactttgagaggccaatgcgggcgatctcttgaggtcaggagttagagaccagcctggacaacatagcgaaaccccatctctactaaaaatacaaaatttaggccgggtgcagtggctcatgcctgtaatcccagcactttaggaggccgaggaaggtggatcatgaggtcaggagttcaggatcagcctggccaagatggtgaaaccctgtctctactaaaaatacaaaaattagccaggcgtggtggcgagcgcctgtaattccagctacttgggaggctgaggcagagaactgcttgaacccaggaggcggaggttgcagtgagccaagattgtgccactgcactccagcctcagcgacagagccagactccgtctcaaaaacaaaaacaaacragaaaaaaaaaacaaaaaacaaaatttagccgggcatggtggtgcacacctgtaatggagtcccagctacttgggaggctgaagcacgagaatcgcttgaacctggcagacggaggctgcagtgagccaggtgacagagaccttgtctcaaaaaacaacaaaaaactttaagaagaaaaatgtattttcttttttcctttttgtcctttaaaacaataaatgaagcagtcaagagaatagtgtatttctgccataatgcatccagcaagtaatgatcccaaggacggatgatatacacaaattttgtataaatgaatttttattttgaaattgacaaaaccaagatgactctaataattttattcatttataacaaacttagctaataactattctaattttaaatttaaaaaaacaggaaaattcctgtttaaaaaaaaatccgcggaagactaaacacactagtaattttaagaaaactttccaagaaatccagagtagtaaagctaattaatagtttaaaaaaaaaaaaaagaactggtaggaggggcacggtagctcacgcctgtaatcccaacactttgggaggccaagactggtggatcacctgaggtcaggagttcaagaccacctgaccaacacggtgaaactccgttccactaaaatacaaaaattaactgggcgtggtggccctgtaatctcagctacttaggaggctgaggcagcagaatcacttgaacccaggaggtggaggctgcagtgagtccagatcatgccattgtactccagcctgggcaacaagagcaatactctgacttaaaaacaaacaaagcaaacaaacaaacaaaacccacaaaactagtcmacctcagtttaaaattatcccgtaaatggaaatcttacttacttttattttttattgtattttttgagacagaatcttgcactgtcacccaggctggagtgcaatggcgcgctctcagctcactgcaagctccgcctcctgggttcacgccattctcctgcctcagcctcctgagtagctgggattacgggcatgcgccaccatgcccagctaatttttgtatttttagtaaagacggggtttcgacatgttggccaggctggtcttgaacaactgagctcaggtgatccgcccgcctcggcctcccaaagtgctgggattacagacgtaagccaccacgcccggcctattatttttgagacagagtctcactctgttgcccagagtggagtgcagtagcccgatctcagctcactgcaacctccaccacgcaggttcaagcgatcctcatgccttagcctcccaagtagcttggtgggattacaggtctggctaatttctgtatttttcagtagacacggggtgttatcaagttggccaggctggtcttggactcctaacctcaaatgatctgcccgccttagcctcctaaagtgctaggattacaggcgagagccaccgtgcccggctgaaatcttacttttaattgkagttaataaaaacatacaaagacacgaaaacaaagccctactctgttggcttttgatttaaccccgttacactttttttttttttttttttttgaggcggagtctcgctctgccgcccaggttggagtgcagtggcacaatcttggctcactgcaaccgccgcctcctgggttcaagcgattcccctgtctcagcctcccgagtagctgggattacaggcgcctgccaccacgcgcagctaaattttttctatttttagtagagacggggttttgccatgttggccaggctagtatcgaactcctgacctcagctgatccgcctgtcttggcctcccaaagtgctgggattacaggtgtgagccaccgctcccagcaaccccgttacatttcttatataaaatacactagcttacgagtgctgattctttctgccatacaccaaggcatgtgaaactcaaaattttaaagtcaacagatctcaacatttatgaagaaaatgctccttgattatgccttccttaaaaaaaaaatgaacaagttgctcacaagcaaatcctgattatcacatacacaaagctgtttacttcagactctgacctcttaagcagatatggttaacagctactttcctgtattgacggttttatattatgatcagcgatatcacgcagttcacagagacttagctgtttgcagagcactaagaggatgaaaagggcaacctctaaagaccgaacgatatcatcattactgtccatcatgcacagtaagacctcctatatccttaaatccaaaatgagactatgtgataactgctcccttcttaaactgaaacctgcactgcagctttttctcagagaaggaaatattcctcctaccccttcccaatttagatttgcaagttttctacattttcaaaaacaaaaaacaaaaaaacaaaaaacaaacaacaagaaacgtagactagttgggaggagcccctagcggagttaattacagcacttcacagatcgtagttagcaattgacagtttcacacccaaaacagtatcgtcatcgccaacaagagcttttgtttgcaaatgcagcgcagtttttctagctttgcctgcaagttggagtgactgggttttattctgaagggaaatgggggctgaggaagagaaaggagagagatacgggaaagagtcattgactaatgactggaaccccgtaactgaaaggaaatttcttgtccccccgcaccccgccccacgccccaaacacacacacttctgaccataaacacaaaaggttggggctctgcaatcttatctgcgcaatatgagccagcaaccgctccattagtagcaaacaatagggactcccccaaggaggccccaaatggaccccctaaaccagaaatccccctcctttcctccaagagtcgggggctccataaataccctcttgttattgacccgcaaggcctactgcaatcaagcagcggccggtttgcttctaaaccgagccctccaatacagcatgtccctgccgccccctatagggccgcctcgtaccctataacctccaccatcatccccctaagtccttgccgcccccttcggcctcatattccctcatcttcgataaagctactccgagtacttagcctgttcctcctgccgaccctgctgcgcaccacattcctatattcgcctcctctcaggcgctcccaccccacacagctgccgaccgccttcctccccaggcccggccaggccttaggcctccgcccgagagtcccccagagccggcccggggggctccccacagcccccaaagcaccgctgacctcgaccccaccacctcaccccaagcctcgcgactcgggcccgtgtcctaccaacgaggccactcccgctcggcaccctcggtcctttattgttgactcgaagctcccaaaatggcggacgctccttcctcctcggaaacctccgcccgcccccacccagccctctcgctacggcctcctctcgcccccgcccccgccccgctccgaggggcgcgcaggccagccgcccgagccgccggctcccccggctgtccagccctacctcctccgctgcccgctctcgtggcgccgccgaagtcgccgcctggctgagctaactcggctcctctgccccctccctcgctcgcccgttcgcccgcccgccgcctcctccctctttccctgcctctccgcatggcggcgaccgcggctcctcctccactcaagatggcgaaacctcggccgccgcggctatattcgccgcggcgtcactgccttcctggcctggtggtgagaggaagtcgggccgcgaaagcttcctgaggagaaaatggagggcccttctctcacaccgacgagaaaagttcgagggggaaatacgagttcctttctgaagggacaggacggctgcttttccacagccgcgacgtgattgagaaatggtggctggcaagggtaggcctgccttcgcccctccaaagtaaaaatcgggagttgagaccagaggaacatctctttattacatgactaaggatatgttttgaaaactggcccccgggcagctgctcggggacaggaagctgacctgacttctccagctggccggggaggctgatgccgggcctaaggggccgcgtccgagcctctcggggcgcgcctccatgcaggaaggcgcggaactagcgacccggagacgccgggcgcgcgtctgagtgtgggggcaggaaggggggccgaccgggcccggaggccgcaccaggcaggagggaggactccagagagtgcgcggggggcgctgcgcggtgggacggggcgagcctgtagggcgcgcctggcggcgggtaggctccgggcttgagggtgcgcctgggggcgctggttgtgggggaaggcaccgggcttgagggtgcacctgggcgggggaagtcttcgggcatgagggcgcgcctgcgggtggtatgggggggtacaccgagcttgagggtgcgcccggggggctctcatgtgaagggtaccaggcttgagggcgcccctgcggggggcgcagaggcaccgagcttgagggtgcgcctcgggggtctgcggggggaaggcaccggacttgagcgtgcgccgggagaggacggcgggggaccggactgtgagggcgtatcttgggggacctgtctaggaggaaccgggaggtgaaggcacaactgggggtgaggcgggggcaggggccgggctgtgagagtgcgactgaggggggattactccggagagcacggagctgggggcgttgcgcaggtggagtggggaggcctggtggagagggtagcaaaccgagagagcgcaccggggtggtggggggagaagctggactgtaaggtgaagagttagtagggcgcaaccgtcttctcctgccctcgaagggcaagactgaagaaagtaggggcggaggaggccgggccctccactaaagggagggaagctagtgaagcgtcagttataatagaaataggaattcagtaaggaaatggagaagcttaaggcaaagggtgactctccggcctgaccctcactatgaagatatttatgtatgttcccataatacttttcagatcccaatgtctgtgtttatccttgacagaaataatagaactgctgtcttcttccaagttaaacaaaactttggagctaaaagctagctaggtcaagagaaacaaaatctaatcctcacccaattgagagactgaatatacaaagaatggccaaacctaaccatgacctcctacccataacctcttcagtaatcggccagaagggtcaggacttaatctttaaccggcagcttccctatttcttgcccctgcttccagctctgggccaatcagagaaagccaaatgtgctcctcacaccaatcgcgtaagaagccctgcttctagtatagccctcctccaacttcccgatgccaacatcctccaatcagagccaacctgaagtttctcccttttttcagtatatgtaaagcttttccactcccctgcctgcctatgagtctgttaaatcaagtgatgggtcgcggctgactcttgccagctctgagtaaatagcctattctcatttggtggtcgttatttctacacagccggtgggaaggtggtggagaatagtgaagactattcttaaggttaaaaagaaggttcggcttacattttttttttattttaaatttacagcatggcgtctccagcccaggttttaaaataccttctaatgtaaggaaatagccctgcaccttgtgcccatcctagagagaaaatggtttcttaataaaaaatgtatgaggccttttttgccccaatatcttcccaagcagaggaatgtgaaggggggttgggccaagaagtgagtggtaggaagagaggcctacggatttaaaacaggccactgcttggaggggtgtctttcctaaaccactgaagaaattgaaccaggcaaaggaagggggttcacacccacaaataaactataacctacaaaaggagcccgggttcacatccacaaataaattgtaacctacacaaggagtctggttgaggtcacaaaacaaaagccaggaggcaaccaaaagtagaatatgaaataggtgctgccttctcacctaggaatccttccagggctaaaaccttcaaatattctgcttttaaggtagtcagataccctcacaactcatttacatcagcccttctctgttttcaagtgagaagcatagatggtttagaattaagctatgaactcttggatcttttcttccaagtttagtgttagtggtagataggtctagtccaactatctcaatacattgttttctccctagttaaaacagatttgcaagaatcatttgtatgacactttaggaatacagataaattgctagtgcaaataatatccttatatttataaaatatatgtgtacttttaaaaaagttatatgaatccaatcctctggccttttagttagtattgagtgtgatagttgtgggagatctgtagtaaatacggtttctgaagggtgtgctatcatccctaatgaactcacctattaattgtggtaaagagtttttcacttgggctgggcacggtggctcacgcctgtaatcccagcactttgggaggccgaggcaggtgggtcgactgaggtcaggagttccagaccagcctagccaacatggtgaaaccccgtctgtactaaaaaaaaaaaaaagaaaaaaaatagctgggcatggtggcaggtgcctgtaatcccagctacttgggaggctgaggcaggagaatcccttgaacctggggaggcggaggttgcagtgagccaagatcgtgccattgcactccagcctgggcaacaagagcaaaactccgtctcaaaaaaaaaaaaaaaaagaaaaagaaaaagaaatgaaaaaaaaagtttcccaacatgtattagccgttttcatgttgtctgtattcacctttgcgtcatcacccctcttcaatttcctcctggaattcaatcacagtaatgggttatctcagcatatattattcgccagtctcacatcctgacctcatttatttacctaaaaataaccagaacgaaaaaaaaatcacagattaatttacacttgatttcactttaacttcaatttaaaatacttagaatccagaattcctagtaagttgaacctggaatacgcagacctgtgataatatcttaaacactcaaatgttttcaacttgctgaaatggagttcacacttttaacattctgggctttttttttaaaagggactataatactttaactcaaattacaatcaaatgtgttcattacctataagaaaaaaattttacctatctcatatcttcagtgaaatgattatatcacatctggctaagctttaccatttggtatttgccctctttcaagtgatttgcagtataatactttgatttcccaaaatttcaacatacaaagttattttccaaatatgctcaagcaacatctgatcatcactaacaagactaaaggctaatatgcccaaggagccaagtcccgttttcttgggacttcatagcaggtaaaaattgccttttcaatttatacacctgaagaaagtgaagcagcatcagtcactgagggcttagtagagatgtcctcagagaggtgcacatactgcgctgaagttgatgcatactaagcaggcgtgcttaatcactgagaggttacatcaggcacattttgttggaataaatgttccaacccctgagtaaactcaaattgaaaagtaggaaagttggccagcgcggtggctcacacctgtaatcccagcactttgggaggccaaggtgggcggatcacgtgaggtcaggagttcgagaccagcctggccaacatggtgaaaccccatctctactaaaaatacaaaaattagccgggtgtggcagcatgcacctgtaatcccagctacttgggaggctgtggcggagaattgcttgaacccaggaggcagaggttgcagtgagctgagattgcaccactgcactccaacctgggtgacagagtaagactctgtctcaaaaaaaaaaaaaaaaaaaaaaagtgtaggaaagcaatagtacaaacgaggaggggagtgggtgagttaaacacattttccccaaactgccaggtttactttgcagaatttgtattctctttcacagataacataaccctcattcccagcacaccacaaccaagctagctagctggctcagctcacggtgtccttcggccacatcgggactcagcatggtatatgttctggtcatcacccagagaattctagctattcattttgactcttcagtttcgctaagatgactgcatgccagcaattttaacttatttattaatttgaaaataatgtgtggctgggccgggcacagtggctcacgcctgtaatcccagcactttgggaggccgaggcaggcggatcacgaggtcaggagatcaagaccagcctgactaacatggtgaaaccctgtccctactaaaaatacaaaaaattagctgggcgtggtggcatgcacctgtagtcccagctactagggaggcttaggcaggagaattgcttgaacccaggaggcagaggtcgcagtgagccaagatcacaccactgcacttcagcctgggcaacagaacgagactccgtctcaaaaagaaaaaaagaaaagaaaaaagaaaaagaaaatatgtgtggctggaagacactgaaatctggaaaacagctatttaggtataaatttactttgacttactgagatcaagaaagaactgacatcgtcctcatctaagataccttgttctccttgggtattttccaagttagttcaggggcagttgccgaggaataacactgatgggggttcacactatggcgatcttgttgaactgcctgatgttggtttgtgtaatctgccccctttgtgcccaagaacctgtgacaagattctgcttctgacaaccttctgtgcaggggtagcgacaggagtctgaacaatcattaagtgtccagccctggtttcctgccactagtcaatctgcagagacttttattgattcttgaaaatacaactgtgattgtaggtttgggccctgggaatgtaatttatagctaaagaatgggcaatgtcttctgtcctgagtgccatggttggattgtgtaacatctgtggctaccaggacaaggaaggaacaaaggaagacaaaagtatttcagtgcagagatcttctcagtgaccctccttgcttttcatctgcctgatgaattttaaagactactttttatcatatctccacaccgtaaactaccccctcagtggctcccagtttccttttactacatctagtctacactccatagaccgactgagactgccaatatgcctacccagtcggatttcctactcttcctccccccatacatttgctgctctggtctcctgaaaggttacattccctcacctctgattgtttcccttagaaaccctctcatctcctttcctctgggtctatctaaatctcactcagaatcctagatatattaccacaagcccctatcctcctatgtttcccattcctttgctcctgtgcaaccagggctcaggctctggagtcagacagatttaggttcataatcccagttctgccacttattaactattactccataaatgtggaaacatttctcaactctttttttttttttttttttttttgagacggagtctcgctgtgttgcccgggctggagtgcagtggtgtgatcttggctcactgcaacttctgcctcccaggttctagtgattctcctgcctcagcctcccaagtagctgggactacaggtgtgtgccaccacacccggctaatttttgtgtttttagtagagatggygtttcaccattttgaccaagctggtctcaaactcctgacctcaaatgatccaccctccttggcttcccaaagtgctaggattacaggcgtgagccgccgcgcctggccatttcttaacttctgaacctcaattttcccatttataaaatgggtaaaaagtggccagcacgtgggtcaggcctgtaatctcagcacttcggaggcccaggcagaagaatcgcttgaggccaggagttcaaggtcagccggggcaacatattgacatcccgcctctacaaaaaataagctgggcagggtggcgtgcacctattgtcctagctattcaggaggctgaagtaggagaattgcttgagcccaggagttcaaggctgcagtgagttatgattgtgctactgcactccagcctgggcgacagacagaaattctgtctgtacaaaaaatgaaacaataaagtggataagatggggataataggacctagagtgtcatgagggtaagtgaatgaaataaatcacttattttagtagttggcaaatggcactcaaaaaaattagttggtgttgctattgttattttgttgacttttgtctgaacctcttcttattctatcagattacagcctgaggttggccaattcaattctatttccctagcctctattgtctctcagctcttcagctttgtgccctaccaaccttaataaacaggtgccacactctaatttcacagcctctgctccaggaatgttgatgctggagagagccctgtaaccaggctgattggttcaacaataaattcttgcttctgaacctcagctgagccctttctgctgctccacaaaccctttactgctggttctcaattgtggatgctcattagagtcaacagaggcgcttatgaaaccactagtgcctgggccccatcccaggagaattaaatcagaatccttggggctggggtccagcgtcatttttttgtgtgtgttaaggctccctggatgatcctaatgtccagccaggaatgagaaccacttaattgttcttcaaggacaattatttcctactacagcattccacatcttttcttctatccataagcttaccttcaaatcaaatagaagcttcataaacttcccaccttcataaatccacagaagcttcataaactttccacctccctccctgacaaacttcattttgttcctttcttggaagatagagcatcacacctcctatgtaaggctaatctatccttttttaaaataaaatattccattgattacctcctttcctttatatttttaatattattaaatgtttctctctctgttgcttcttcctctcaacctggatttgttcccaagtttttctccattctaaacaacaaacaaaaacaatcttccctcactctggttccaggttgaatgagagaagagggaagaacaagtattcactgaagggctcccagggacaggcgctatgttaggtgacatccgttgcaaaatcttggccattcttgctctgggatatcacttccatctctgcttctccatgattactgccactgtctcaacccagggtttttttcttttgcttagactatttactggacttcctgcttcaacctcttttcctctctaacccatcctgtacagtaatgccagagtagtcttcccagtcagatcactattctgttgaagagtctttcataattctccattaactactggataacatttcgatccctcatctctcttcagaataagtaggaggcccttgggacctccttgccccaaaccccatgagtgatctgaccttctgatcattgctgggataagacaggtcttgtgatatttttatctttgaatttcttggttcttctcataatttgtttcagcttaaatgttacctcctcctagttgccttccctgatgatattaaagtagtgcccctctccctcactctgtaccccattaaatgatctgaaattattttgtttacatgttgattgcctatgccctccccaacagcaagcccaactcaaatccacttctaccattgagctttgctgattcatcccagtgctccttgtgctcccatcactttgagcttgctcattgctaaggtgataaaatcagatttcttcagaacacactgggattttctagggtaattattattagtgctcctgtttatcctcagaactatcccaattgggacaataaattatataatcactggatttatagtcttgtgtcatacccatttgtaaagatgtgttatttctaagctcactgaggacaggaacaaagtcatgttcatctttctttcttttttttttttttttttttttttttgagacaaggtcttgctctgttgcccaggctggaatgcagtggcacaatcacggctcactgcagcctcaatctctgggactgaagctatcctctcaccccaacttgccaagtagctggaaccacaggcaggcaccaccatgcctggctaatttttaaattttattttattttaattaattaattattattattttttgagacagagtctcgctctgtcgcccaggctggagtgcagtggcatgatcttggctcactgcaacctctgcctcctgagttcaagcaattcttctgccttaccctcccaagtagctaggactacaggcgcgtgccaccatgcccagctaatttttgtattttttgttttaaatttatttattttttgagacggagtctcacttcttcacccaggctggagtgcaatggcacgatcttggctcactgcaacctccgccttctgggttcaagcaattctcctgcctcagcctccccagtagctgggattacaggtatgtgccaccatgcctggctaatttttgtcggtatttttagtagagacagggtttcactttgttggccaggctggtctggaactcctgacctcaagtgatccacccgcctcgggctcggcctcccaaagtgctgggattataggcgtgagccaccacgccaggctattttatttttttgagatggagtttcactcttgttgcccaggctggaatgcaatggctcgatctcagctcactgcaacctccacctcccggtttcaagtgattctcctgccttagcctcccaagtagctgggattacaggtgtttaccaccacacctggcaaatttttgtatttttagtagagatggggtttcaccatgttgaccaggctggtcttaaacttctgacctcaagtaattcgctcgcctcagcctcccaaagtgctgggattataggtatgagccactgtgccggccttattttaaagagacaggggctccctaggttgctcaggctggtctcaaactcctggactgaaacaatcctcccacctgaagtgctgggattataggcccgagctaccctgcccagcctgtgttcatctttctttcaccaataacatctagtaaggtattttgtatacatatattagaagctcaggaatctattgaatgggattggataattgattaaaataagacaatgtatgtggagagactagcacgatatctaatacatggtaaatgtgttaaattcttttttcccaaacgtggtatgtgctaaaaattaaaataaataaatagataatgttaagttgttttttttttttttggaaacagattctgtctctttcacccaggtgtggatgtgcagggggccctttttgtggttcactgcggagctccgcttcccaggttcacgctattctcctgcctcagcctcccgagtagctgggactacaggcgcccgccaccgcgcccggataatttttttttttatatttttgatagagacagggtttccccgtgttagacaggatggtctcgatctcctgacctcgtgatccacccgcctcggcctcccaaagtgccgggattacaggcgtgagccaccgtgtcccgccttttttttttaagacaaagtatcactttgccatccaggctggagtgcactggcatgatcatggctcactccagcctcaatctcctgggctcaagcaattcctcttgccttagtctcctgagtagctgggactacaggtgcatgtcaccacatgcagctaatttctttatttttttgtacagacgatggtcttgctatgttgcccaggctgatctcaaactcctgggctcaagcaatcctcccaccttggcctcccaaaatgctgggattacaggtgcaagccaccatgcccagccttgaagtttaataaatcttactttcccttccctcagatgggtccaggtgtcatatctctcaagacctttgtttaccaactactctacacagtttagtacccaagtatgtaccagcttgtttgcctttattgagctttttgtgatgttgtttcttttaccacatcagaagctttcatgtatcatatcttataattatcaattccagatagcagaactagttctttcttgtaaattggttgatattgagatgttcaatatctattggctggttaatttgcaggaaggagagaaatgatgacaaagataccaggttaggtgcccacagtcagtggcacaagcgtaaaggatcatgttccctgtttgaagatgcatgtatatgcgttctagcaagcaaaagttggagcttctaatatatcctctcaacgttttcagtaactaaaaagatacagattcaagtgatcaagtaatctttacacaagagtataatgccgcttggaagtaagggaagaatgaaaaatatgcttagtgtagagatctgactatggaatagtaagactggggtttgaattcctaaattatttacaaataacttccctatgcctgttctctcatctgtttaatggggatggtacatctgcctctggggagcttgtaagaagagtaaatatgaaatatatatatatatatatatatatatttttttttttttttttttttttgagacagagtctcactctgtcgcccaggctggagtgcagtggtgcaatctcagctcactgcaacctccctcacccgggttcaagtgattctcctgccttagcctccagagtagctgggattacaagtgtgcaccaccacacctggctaatttttgtattttttagtagagacagggtttcaccatgttggccaggctggtcttgaactcccgacctcaagtgatccgcctgcctcggcctcccaaaatgctgggattatgggcgtgagccaccactcctggccttaaatgataaatattaatagtttacataaaatgctcagcatagggactggctcattacaagccccaatcagcaatagctgtttttataataggcagtctgagccactacaaaacctggatgtgaaaggtgaagctagctaagatcattaagttctcaaattttaagttaaatcttgtttctaatgccaaggacaaactataattctttacttgttcgattgattcttttgttcattcacttattattcattcatttattccataccaggtacacaataaatgcttattaaatgctattgagtgaataatagtaagtaacttgggggaaaatagagctttttttttttttttttttttttttaagacagtctccctctgttgcccaggctggagtgaagtggtgagatcttggctcactgcaacctccacctcctgggttcaagtgattcccctgcctctgcctcctgagtagctgggattataggcttgcaccaccacgcccggctaatttttgtatttttagtatagatggggtttcaccatgttggtcaggctggtctccaactcctgacctcgtgatctgcccgcctcggcctcccaaagggctgggattacaggcatgagccaccgctcctgtccaagagctttttaaggatatgccctcagtgatatctgtcaatgagtgtaaaataccccgtgaccaggaccaggacaccatgctggatgctgaaggttcaaatccagctgtgtcacctattgggaacccagccagggatgtgcagcattcattccttcaagctatctaacctattacctactcaaggcagatgactgcctcatatttaatggaaaaatcaaggtcatagtgctgaatgttcctcaatttcccttctcctctagacccgtcttccactgaatctggtcttaacctcattccctgatatctcttccctccagtacccaagagcagagttaatcacttcccagtcatctgtgccaccatcgtgcaaatttctattactgcaaagtagcagagttgatttggttgtaggtttgccttccacaagaactgagtctgtctatgtcttattcttctttgtgtgtccagcacctcacatatggcctggcatttagtaggtgctcagtaaatgcttactgaaggggcttttgagtttttgttttgtttcatttttgagacagggcctcactgtggctcaagctggagtgtagtggtgcgatcttggctcgctgcagcttctgcctaccaggttgaagcgattcttgtgcctcagcctcctgagtaactgggactacaggccctcaccaacaggcccagctaatttttgtattttttggtagaggcggggtttcaccatattggccaggttgatctccaactcctgacctcaaatgatccaccctgctcagcctcccaaagtgctgggattacaggcatgagtcgccgcacctggctagaaagagcttttgaatcaactacttccctttagtctcctcttcaaaaataaactttccaaaagacctacacactacctcaatttccacttccttatcctagatctctgtacatctaatctatcaccaagccctatgaattcaacctctaaaatattttctgaatatgtccactccttgttgccccattgcctccaccttcatccagacagatatctttcattggcctgtttactgctgtagtctcctaactagggctccctatttattctcgtgttagcccccatctattctgcgcacagccttagtgattattttaatgtaaatgaaagtatcattactctgcattttcagttgcttcccaatgagctgaggatacactccacattccctgctctggtctacaaggacctacacaatctgaattctaccaatccctccctcttcaactcatgccatgccctagttgctcattcggctccagccatgctggcccttagaggttcggatcagctcaactctttcccacttcacaacctttgaatttactgtttcctctatctggagcactcctcccctctcctcacacagctgctgcttcttattctttttttttttttttttttttttagatggagtttcactcgcccaggctagaatgcagtggcacgatctcggctcactgcaacctccgcctcctgggttcaaacaattctccagcctcaacctcccgagtagctgggattacaggcacccgccaccatgcccgactaatttttgtatttttagtagagacagggtttcaccatgttggccaggctggtctcgaactcctgacctcaggtgatccgcccgcctcagcctcccaaagtgctgggattacaggcgtgagccaccgtgcctggccagaactggcttcttaaaacaaatttatcagccaatttatccaaacttcatggattggcacacaagatgtcttcttccaatcctaattccttcctccctgtctctcttggcaccctctttcccctccctctttcatgcctcacctttacagaaattcagttcagtttaataactattaactggacatccactgtgttccaggcactgtacttgactatgggggagaaaatatgaatgaaaacagatagctgacttcaaggaatttatattctattagtagcaaaggtagatagacatatgaacaaatataacacaatgttccattccataatgaagatatatactaaggctagaagaagtactgaggaaaaagtaattaattctgcaagggtacaatggcatgatgcttcagagaaggtttcaagatgaaattctgaggattttgaaagttgggtaggaaatggtcaggtggatcaaggacggaaaaacattactggccgagtcaacaacaggttgactaggatctggagtgaagtcccgcaagtagctttagtgtgtatgtgtgtgttggggagagaagtggtgatacctgaggctggagaggcatcaggagtcactatatcaacagcctctgtkttgggctatgaagtttggacattatcttataggtgaggggaaccattaaagatttcgaagcagcagcaggatgacttaatgggactttaaggactattactctgacaaccaaatagagatagattaagaagggccaagcatatcagtgaggaggtccctcatcatctctcagactatgatggaaaatggctcctaactgatctctttggccatctaatccatcctctacccagcaagaagagaaagaaggagagagagcagaattcactgagcagataagttaaatgacaggacctggggataggttggatttggggaggaagaagatggaaagaatgatgtctaggttactaggtctgtgtacttgatgaggttggaggcaatagcaactgtcagagtctaagagaaagagcaggtttcatggcgggcatggtaaataatgctttcagagatgcataagttgaatactgaatctggggtgcctctagggaacctacctcgcaatatgggactggaggtaggagagaggtcagaggtggagatagggaaggtaccttctgcatagagatggcagttagaaccacaggagtagacatgatctctcagggaaaggtgggtaaagctgggaagggggagaaaggatgagctcaggaaagagcaacaccaggtggagtcagacagtggaacaggatttggcaaggtggctgtgaagggagagacaggcagaggacaggaaaagagtggtgttccagcagccagaaggagaggggacttcaggaagaaggagtggttgggaattttaaggaagtaagacgagggccaaaaactactgttggttttggcaactggaaagtcattgctaaccttggcaagagcatttccagtatagcaccggggcagaagacagattttagtacggtaattgatattgataataatacctaatgtttattgactgcttgttatgtaccaggtgtgcgctgttttatatgaatgatcttatttaatcctcacaacaaccctccaaagtgaggcaggcacagttatctctctctttagggggagggaaacaggcttaatcgtaagaatcagttggggtataaacccaggtctgtctgtcaagaaactccatactccacttgatcttagccaaaaggccaagaggcaatacaaactccatactcttcatgactcttctttatcctttctttcaagtgaatggaaggtgaggaagtggggacacagtcttttaagaatcttggctgaggtggggagcagtggctcacacctgtaatcctagcattttgggagaccaaggctggtggatcacctgaggtcaggagtttgagaccaagctgggtagcatggtgaaaccccgtctctattaaaaatacaaaaattcggccgggagtggtggctcaggcctgcaatcccagcactttgggaagccgaggcaggcagatcccgatgtcaggagtccaggactagcctggccgacatagtgaacccccgtctctactgaaaatacaaaaattagccaggagtggtgtcccgcgcctgtagtctcagctacttgggaggcttagacaggagaattgcttgagtccgggaggcggagattacagtgagctgagaccatgcccttgtaccccagttctgggtggcagagtgagctcctgtctcaaaaaaaaaaaaaaaagccaggggcggtggctcatgcctgtaatcccagcactttgggaggccaaggtgggcagatcacctgaggtcaagagttcgagaccagcctggccaacacggcggaaccccatctctactaaaaatacaaaaattagccaggcatggtggcaggtgcctgtaatcccagctactcaggaggctgaggtaggagaatcgcttgaacccaggaggcggaggttgcagtgagccaagatcgtgccattgcactccagcccgggggacaagagcaagacttcatctcaaaaacaaaaaaaaaataaaagcaggattcttcatcatattagaatttcagataaatgaagaagaaaaaagaaaaaaatcattctgctataaaaacacatgcgcatgaatgttcattgcagcactattcacaatagcaaagacatgtaatcaaactaaatgcccattaatgatggattggataaagaagatgtggcacatatgtaccatggaatattatgcagccataaaaaatgagatcatgtcttttgtgggaacataactggactggagctggaggctatcatccttagcaaattaagacaggaacagagccccagatatcacatgctctcacttttaagtgggagctaaatgataagaacttatgaacacaaagaagggaacaacagacactggggcctacttgagagtggagggtgggaggagggagaggagcagaagagatcactattggctactgggcttaatacctgggtgatgcaataatatgtacaacaaacactcatgacacatgtttacctacgtaacaaaccttcacatatacccccaaaccaaaaataaaagttaaaaaaaaagtgtagacatatatgcatactccttagctctatgcaccaagacagtttggaaatggtcatactctaatagcagttaacacccctagtcccaaatcttggtctctaaataccgttctccactaaaagaaaccagggatccttggagaaatgattgatttcagggctgagacaaggaaagtacaagatgaactcagaccatcttgctgtggcagaaagtaaagaagtgcttaaagaatgacagagatatgtcaacaggatgtcaaaggggcttgaagggggctcccctaaccaactctgagcatcaaaataaataatgacagtaaaaggtcataatctatcaaatgaagtgggaatccacatgttcatactgataagaataaaagaatacataaacaaatgagaacatctttctttacagcagaataacaactaataaatttagaaggaacaatgaaattgaaaaaaccactattaggcaaacttcatagtaataattcattcagcaaaaaaaaaaaactaaaaatagtgaggaaaactatgataaggaacaggatatgtacctcaaagaagtacctttccacaaaacacttactaattacaaagggcaaaagagtaactttacagtggaaagacctagcagacaccaccttaatccaggtcaaagttaacattctggtgaggtttggattaaaaacaaatcaaatatgcaaacaaaataaacgattgtatcaaattttttttaaaaagagaacaaagttaacattctcaataatggtacaaattgaaatcaggtaccaccagatgggaggcaataacacagtatcacttctgtcctattcctgccaaaaaaaaagaaacactgagaaattgttccagattgaaagaaacatgagccaggtgtgcagtggctcacgcttgtaatcccagcactttgggaggctgaggcgggcagatcacctgaggtcaggagtttgagaccagcctggccaacgtggcaaaaccccgtctctactaaaaataaaaaaaatagctgcgtgcggtggcaggtacctgtagtcccaactatttggaaggctgagacaggagaatcgcttgtacccaggctgtggaggttgcagtgagctgagatctcgccactgcactctggcctgggtgacagagcaagactccatctcaattaaaaaaaagagagagaaaagaaaagaaagaaagaaacatgaaaacaaatgcaatgcatggtcctggaagagacccttttaatataaaggacagtattagggccgggcatggcagctcacacctgtaacctagcactttaggaggctgagggaggaggattgcttgagcccaagagttcaagaccagcctgggcaatatagggacctatctctatgaaaaacttttttaaaaatttgccaggcatggttgtgcacatctgtactcctagctactcaggaggctgaggcaggaggatcccttgggaagaacagttccagactatgctatgatggcaccactgcactccagtctgggcaatagagtgagaccctgtctgaaaaaaaaagggggggtaggggggacagtagtgggacaattagagaaatctgatctgggcctgtgggttagatggctgtcatatacttgtttgagtgtgtactcatgttgggaggatgggcattgtgttggaaatttaatcttggatggttcagaaaaaaagttcttgaaattttttttaaatttaaaattctttcagcataaaatgaaaaataaaattttaaaatctatcagtaattcctctgataaataagataagctattgaattaatggaacaaaaacagtacacataaagagaaactttcataaacaagaaagagctcttggaaattaaaaatatgatagaaaatttgtttaagtgttcaacagaaaatgtacaaagtaaaattgaagaaatcttagagataaaagacaaacatagaaaacagaggaggatggccgggtgcggtaactcatacctgtaattctggcactttgggaggccaaggcaggaggatcacttgagcccaggagttcaagaccagccttggcaacacagtgagtccatgtctctacaaaaaatttaaaaattagctgggtgcggtggcagtcacctatagtcccaggtactaggggtttaggggagctgaggtgggagggatcgcttgagcccttgagtcaaggctgcagtgagctatgattgtaccactgcactctagcctgggcaacagagctgagaccctgtctcaaaaacaaacaaacaaaaagaaaatggaggaggaaaacacaaaatmcaagctccaaggcaattagattaggccaggagatccagcatctaactaatgggtgttcaaaagaaaaacaacatagaaatcagaagggaagaaatcatcaagcaagtaataaagactaatccccatattgaaggatacgaatcgctagattgaaacgtcccatctagtgccagcacagtcaatgaaaacagacccacagcaaggcacatcatcaagaaatatcagaaaatcaaagacaaagagaagaggtctcagaaagggaaaacctaaactaaacaaaaacaggccacatagaagagcttaggaatcaaaatgactttagacctattaacagccacactgacaccggaaggcaatgaaggagtgccttgaagattcagaaggaaaattctgtacaacctagaatcctaaatagagccaaacttttgtatgaagtatgaaagcaaacacacatattttcaagcatgcaaggtctccaaaaatttatttctcatctatattttattcaggaagctactgggggatatgtgtcaccaaaataaggacataagccaagaaggaggaaaatatgggatgaggcgatacaatgggagaaaaaggtaaaggggatctctagaaggtgatgaggagaggtcagaagacagctctgcaccaggagtagtagcaaatgacagaaaccgaatgcaaactagtttaagcaaaataaaaatattggcttggcatgatggctcacgcctataatcccagcactttgagcggccaaggtgggtggatcacttggcgccaggagttcgagaccagcctggtcaacatggctgatacggtttggctgtgtccccacccagaatctcttcttgaattgtaatccctataatccccacgtgtcaaaggcaggaccagttggaggtaattagatcacggggcagtttccccatgctattctcatgatagtgagtctcatgagatctgatggttttataagcatctgacatttcccctgcttgcactcactccatcctgccgccctgtgaaggaggtgcctgctcctcctttgcctgccatgattgtaagtttcctgaggcctcccaagcaatgtggaactgtgagtcaattaaacctctttcctttataaagggtatttcttcacagcaatgtgagaacggaataatacaatggtggaaccccgtctctactaaaaatacaaagattagacaggcatggtggcacacacctgtgatcccagcttctcgggaggctgaggcatgagaatggcttgaacctgggagtggaggttacagtgagccaagatagcgccaccgcacttcagcctgggtgacagagtgagactgtgtctcaaaaaatatatatatttaaaatatatatatatatatatatatatatacaaaatgttgatatgtgtggtggggtaggtgaaggagtttgtgcaaactgaaaagtccaagattcaggttttcaaatgctgttgtcaagtttgtctctctttcggctgttttcctgtatttaggctctttgtgtggcagcaagagggactctggaagctcaggtttacctgctagtttatgcataagataacaacagggccaggtatggtggctcgcacctataatcccaacactttgggaggctgaggcaggaggattgcttgagctcaggagttccagaccagcctgtgcaacatggtgagacccccatctctaccaaaactacaaaaaattttaaaaattagccaggtaaggtggcctgtgcctgtagtcccagctactagggaggctgacgtgggaggatcccttgagcccaggaggttagaggctagcattgagctgtgatcatgccactggaggactctagcctggtcaatagagcacgagcctgtctcaaaaaatacagaaagaaaaacaaaagcatcatgataacgtcacgataacactttcctgatgacgctcatgaaactcccagggcagattctaacaggcccagcttgggtcatgtgtccatcccacaaccaatcattggtaagggagatggaatattctgattggccaggcaaggtcaagtccccagccccagggctatgatccaaagacaatgatatcacctgcaaaggtctgatgagcactttgtaattggtaaagtgtgcaaatgtaacaattatcacctgtccatagcagattagaccgtatattagaaggaaagagagtctgtattaagtaagctctacccttacagcaaagagaagtagaagtggataacagggagactgacaggaaaaactatacaaattccacatagaagtgcagcattctgggacatttgctgtagaaaaaaatggttctacaaactttattatataacattgttatcaccatgatctatttagaaaaggtttgggggttttttgttttggttttgggtttttttggttgtttttgtttgtttgtttgttttgagacagggtcgcactgtgtcacgcaggctgaagtgcaatggtgcagtcacggctcattgcagcctcaacctacctgggctcaagcaatcctcccacctcagcgtcccgggtagctctgactacaggtatgtgccgcaacatccagctagtttttaatttttttgtggagactgagtcttgctatgttgcccagactggtttcaagctcctgagttcaagtgatcctccaacctcagcctcccaaagtgctgggattacaggtgtgaggcggaaaagtgtaatatacattttaaaattcatgtctggagaagtcatccttgtctgtgtgtttaacttgtctatccagaatgactttttccaaagttgccaggtagctggtgatttaatagggaccctgtcctagtggagagtcaatctcattcagaagatgatgtaggtttattacaggacagcaaacagtgaaaactaaattggccatttatacattaagttctatatactaattatgttttcagttccacactccaaaacagaatatcgaattgggtgggtcccttaaagtagggcaattctcatgtttacatgttaagcttgcttggccagaacttgctaccctaaaaatatactcactctactcacatgtaggatgtaaacacatccctctttgcagatctgtgtttaatctcttgggttctctttagcaatttcctcattagtaagttgtgtgttggtggaaagtgctcccagcagcaaaaacacaagcaggtgcataacatgtggattatcatgctgatagcacttatcccagaagatgacacatctcaccctttttccattttacaaacagctctgacattagatccacctgttacttcaggacatttcaggagcttttcctcagaaagtccaatctcctccccagctgatctgcttctcatcccattagcaatgtcaccacactttatgccgtgtgcgatcatatccttccccaagttatgactatatcgtagggagaagaaaagagaagagagaaggagaaggcaaaggagagaataattaattcatagttcatttattaacttcctaggctttgattacttgcctgaatccattttcttcatatttgggctgtacagtaacctgattcttttgttttcttctgagacaggatcttgctctgtcgcccaacctggagtgctgtggcaccatctcggttcattgcaaccttgacctccgcaggctcaggtgatcctccccactcagcctcctgggtagctgggaccacaggtgcacaccaccatgcctggctaatttttgtattttttgagacagagtctcactgtgttgcccaggctggtcttgaactcctgggctcaagcaatcctcctgccttggcctcccaaagtgctgggattataggcgtgagccaccatggccagcctcaattaatctttatattctcatttcccagtatattcttcatccttcttcatctgcttatcctcaaaacctcagctcaaagccataaggccttaagtctgtttccctcattagaacataagttcaacctggcagggtggctcacacctgtaatcccagcactttgggaggcccaggcgggaaaattgcttgagcccaggagtttgataccagcctggacaacatgggaaaaccccacctctacaaaaaatacaaaaattagccaggcatgttggtgtgcacctgtgatcccagatactcaagaggctaagatgggaggatcacttgagccagcaaggtggagactgcaatgaactaagatcatgccactgaactccagcttgggtgacagaatgagaccctgtctcagaaaaagacaaaaagaaaaagaaaaaaaaagaaaatctatcactcttccatcttttccctgtacctataatttattcattcagcaaatatgtatggattgcctactctatgtcaggcagtgtgtggctgaatggttctcctgttataataataatgataataacttaaaagagaataatgtttatcaaggccagcctgagcaacataaggagaccccatccctacaaaaaataaaattaagttaaaaaaaatcagggctgggcaaggtggctcacgcctgtaatcctagcactttgggaggccaaggcaggcaaattgcctgagctcaggagttcaagaccagcctggtcaacatggcaaaacctcgtctctactaaaaatacgaaaaattagcaggacgtggtggcatgcccttgtaatcccagctactcaggaggctgaggcatgagaatcgcttgaacccgggaagcagaggctacagtgagtcgagatagtgccactgcactctagcctgggtgacaaagcgagactctgtctccaaaaataaataaatgaataaaaataattatttttgttgagacggtctcactctgttgcccaggctggagtgcagtggtgccatcttgcctcactgcagcctcaacttcctgggatcaagtgatccgccccagcctcccgagtagctgggaatacaggtgcatgctatcctgcccagctaatttttgtactttttgtatactctgggtttcaccatgttgaccaggctggtctcgaacttagcttaagcgatccacccacctcagactcccaaagtgctgggattataggcgtgagccaccgtgcctggccaaattaagttaaatcaaattaaaatttttaaaaaagaatgtcacagaaatggaatcatacagtgattaacttttttcacatgctgtatataaattcacaatccattttgaattaatttttgtgtaagatgtgaagtttaggccgggtgcagtggctcacgcctgtaatcccagcactttgggagtctgaggtgggtggatggatcgcttaagctaagttcaaaaccagcctggtcaacatggtgaaaccccatctcctctaaaaatacaaaaaattagccgggcatggtggtgtgcacctgtaatcccagctactcaggaggctaaagcaggagaatcactggaacccaagaggtggaggttgcagtgagccaagatttcaccactgtactccagcctgggcaacaaaagcaaaactctgtctcaaaaaaaaaaaaaagtgacatttaggtcaaggttctttttttttttcttttgcctatggatgtccaatttctacagggctattcattgaaaagactattcttcctccattgaattgcttttgctcctttgtcaaaaatcaatttctggcttgttccattgacctgtgtatctgtcactactccatactgtttaaattactatatctttacagtgagtctgtagcaatacagtaaatcttaacatcagacagaatgattgcttccagattattcttctgtttccaaattgttttagctattctagctccttcgactttctgtataaattttagaataagcttgtcttcacttacagaaaatcttgctggactcttcaattttaataattttaaagttttcttcatttcatttatttaatgtgtattagcttttaaaatgatttattctattgtatgtcacacagatggtcagaagacaccaaatttcctatgtttctaagaggtagggcaagccctcttttgtcatggtagtcatcaaataattccatacgttatctttacaagtgttccttaaacctcacagcaaccctaagaggaatatactagtagtctctctgttttacagatgaggaaactgaggcatggatagattacataacatgtccagtgtctcatagctagaaagtggcagagttgggatttgaaccaaagcaatctggttccagaacacatactgttatcctctgtgctatgctgttctgtttgaatatagttatctcatccaagaaatttttattcagtgcctattatgtgccaaggactgttctaggtgctgtgtgttctaggtgtcctatggcacccatgagtaaaataaaaataaaataaagcagtgattaagacaaaatcccagctcccatggagcttctattgtaaagggggagaatttactgtattaatgcaataattattgttttgttgaagtattattttattatttgatttatattgagaacacagacactttaaatataggagctgggatcttacccaaaagatatgcttattcactggatataaatactcaccataattctaccaatcttctggagactgaaaaatccctcagttgggagatagataaaaccatcttgggccgggcgtggtggctcatggctgtaatcccagcattttgggaggcggaggcgggcggatcacgaggttaggagatcaagaccatcctgctaacacagtgaaaccccgtctctactaaaaacacaaaaaaattagctgagcctggtggcacgcgctggtagtcccagctactcaggaggctgaggcaggacaatcgcttgaacccaggaggcagaggttgccacgagccaagatcacaccattgcactccagcctgggtgacagagtgaaactctctcaaaacaaacaaacaaacaaacaaacaaacaaacaaaaaaccatcttgacttcaaacaccatagattagttttaactattttagaactttagataaaattatacggtatattttcctttctgacttcttttgctcaacattatgttggtaagattcacacatttgtcgcatgtagttgtagtttgttcattcttgttgtgctgttccattgagtgaaataacctagtttatccattctattgcatgtggagatagagattgtctccaatggccgggcgcggtggctcacgcctgtaatcccagcattctgggaggccgaggtgggtggatcacttgaggccaggcgttcgagaccagcctggccaacatggtgaaaccccgtctccactaaaaatacaaaaattagccgggcatgatggtgcatgcttgtaatcccagctactcaggaggctgaggcaggtggatgacttgaacccgggaggtggaggttgcggtgagccgagatagtgccactgcactccagcccaggtgacagagctagactctctctcaaaaaacaaacaaacaaaaaatatgattgtctctttttgacttacaaatgttatatattttaataaaaatatattaaaatacattataatatattaaaatatattataataaaaataatattaatattaatatttgacttacaaatataaatagtatatgattatggtcagttttaatacggccaaacaattttctaaagtcataccattgtttcatactgctttcaaaaatgttcttttgttttcccttatatttagcaaaatattttgttgaggactccaactcatttcatctacaaacaaaagtttaaaaatctatgcttagaccaaagggatggaaaaagaacagcaaagacacaggaaacctgagggaggaggaaactgggacagattcaggactgtttggccagccagttcttcctgtaagatattctctttcaagagctaagctttgggggttctaattctgttttaataaaacacagtgttcctttacatagttgaactgaattgttttccaacaaatatgaattaaattgcctcattatttatttaggttaaacaattaaactgtaagcttaagaggaaagggaccttgtacattcttcaacattatagcctcagacataacagatgctcaataaatgtttggataaatgaatgaataaataaatgaatcagtttcctaaaacttagcaactatctatcatgacctgatgtagcatagttggttcattatgctgtgtctcaaattcaatgatccaggcctttctcctgagtctaccccaaataccatgagactatattggagctctcttgggattatacatggaggatcaataggctggacaaccccactccctcagacagtcagcctggcactgcccttatagagatcctggtcaaacagtagacataggccaagcacggtggctcaagcctgtaatcccagcactttgggaggccgagttgggaggatcacttgaggccaggagtttgagaccagcctgggcaacatggtgagacctcatttccattaaaaataaaaaatttagccatgcatggtgtcatgcacctgcacttcccagctattcatgaggctgaagcgggatgatttcttgagcctgagaagtcaaggctacagtaagctgtgattagcctgggcgacagagcgagaccctgtctcaaaaaaaaaaaaaaaaaagagataatttatgaaagaatatgtacacacactcagaatgatgcatgtggcttaactgtttacaagtgtgaataaatggctcatttacatagagtatcacatttaatcctctcaaagccctaaggggcttgttattataatcttcattttataaatgaggcagttcagagaaatgaggtgagttgttaaaggtcacaaccagtaattgttaaagcctcaatttaaacttaggtctgtctagagcctgagattttaagaattatgtgtgcataaataatttaaaaattaaattttctttggctctcaaggacatgtatttttgcatctgatttcaattaagctaaatacatttggtgccgactaggtaccgaagacatttatataacttaagataatatcacaatgtatttaccttctctaagcactccttcagcttccctgattaggaggcggctgggccttgaaagaaaacttcctttctgatgtacggaacagaggactaggagcctgcgtgagtaggtcttagggtgaaggaagccttttcagaaggggagatgagggagagaggaaaatgaattggcaggaaaaaggcagaaaaggtatatttcaagagggaagtctgaaaattatttccatcagagctttctgtgacttgttttaatgatagccatccaggctttttattttatttatttattttattttattttgagatggagtctcactctgttgcccaggctggagtagaatggcgcgatctcagctcactgcaacctccgcctcctgggttcaagcgattctcctgcctcagtctcctgagtagctgggactacaggcgcccactaccacacccggctaatttttgtggtttttttagtagagacagggtttcactatattggccaggctggtctcaaactcctgaacttgtgatccacccatctcggcctcccaaagtgctgcgattacaggcatgagccaccgcgcctggccagccatccagttcttgaaggccaaagaaagcataataaacctgaagattcttggcagatcctggcattgctggactgcagggtgcataaacaccctgggtgacagatgacgtggccggccatctcaggcccatccctgtgcactgggtctggacggtgccagctccttggcaacactgcaggctgttatgaccctgtgccagggcgggggaggggccgagcaccaggtgacgtggcaacaccgcagtcaaaggaaagccatgctaagaggccactgccccgcagtcctgtgacaggcaaggggaatgcaggaatattggggaagaggggaggggtggaggggaaggatcattgttgcacggctctagcaagaaagaaaatctaaaattctgcttcatggctcagctcccagcacagctaatgcttggaatggaccagttgcctggacagtttcaattatttgtcataagcagctcaggccttggtgtgcagatttcctttgcccctcagtttcagatagcccactgtggcccctgctcatgattcagactgaaatagctgcctgttttgcatgccagttaagcctgcatttcagttcttgtttctttgaaaggacctgtcagggaagcagtatgaaatgtcaggttccggtttggtattccccctctaccttcaaccttgtagcttgacttttgtgggattcccactcatgctcagagtcccctcatgcgaataggcttatctaattcacaagtagctcggtgatgtgatgatgcctggccctgtgaaatcatattttttcaccttacatcaccttccatggactggctggaattcagattagttagccatcccattcttgcttggacatgcttattaaagatagaggatattggccaggcgcagtggctcatgcctgtaaccccagccctttaggaggctgaggcaggtgaatcatccaaggtcaggagttcaagaccagcctggccaacgtggtgaaactccgtctctactaaaaatacaaaaaattagccgggtgtggtggcacgcacctgtattcccagctactcgggaggctgaggcaggagaattgcttgaacccaggaggcagaggttgcagggagccgagatcgtgccactgccctccagcctgggcaacagagtgggactccatctcaaaaaaaaaaaaaggcattatcaattatcaaggaattatcaatttcttcctacaaaataactgaggagtcctacatagatctttacaattgtctgtgtagaagttcaaactcctgaaagttggctagtccttgttcatatctaccccatacctgtgttaataccgtttacatttactctttcagacacaggggaacaaggtcctgagcaaaggaggacttggtatgaacaagtgggtttggtgccgccattgcttctggcttgggtctctgcaactttggtggagcttccaagagctccatgtggggacggagcattagatggttgacaacatctgtggtctgcaggagccactatgcggagggcccagggaagaatttgccattttcaatgaaaaacacgtggcagttactaattatgatgactttgtactgggatcgggatctgcggcacccttctttaaagtaaaacaccaactgcttaagaaataagaatgttttagtttatccattgaacagacatgaagagtgtttcaagagatgcaatccctttgaaaaatggatcaaactcttgaactcatgtagcatactagatatgtttgtgaataaactcatgacatgaaaaatcagtcaatcaatttagccttggacataaatagataatggcttctcattccccgtttacagtggcccctccttctcttgtcttttccaaatacaagaccgcttagatctttatcatcatcctgaggagctgatattcaagattatatgtaagacatggggaacttgaactcagaggggtttttttgtgtttgtgtgtgtgtgtgtgtgtgtgtgtgtgtgtgtgtgtgtgtgacaaggtctcactgctgcccagactgagtgctgtggcacagtcacagctcactgtagcatcaacctcctgggctcaagcgatcctcctacctcagcctcctgagtagctgggaacacaggtatgcaccagtatgctcggctaatatttttatattttgtagagacagggctttgccatgttgtccagactggtcttgaattcctggacacaagtaatcttcctgtcttggcctcccaaagtgctgggattacaggtgtgagccaccgtgcccagccagaattggagatttttaaatacagaaattctcaagtgctttgcccaggaagggctacatttgtcaacttttctggctgctggagcaggtcagagagggctaatattcctgtcagaggtggtagatttcctctgaccccatttgttcatctctacactttctgaagaaaagtcccttttcagatgtctatatatttttaaatattctcattatttagaaagctcctttctttatgttctgagtgaattactcccatgtgttaagagttgggaagtgataggaaaggtagggtccaaggaaagtagtcaaaattgatcaaggacccagctgaaagataaatgaagttgaacagttcacaaaagaggaaatatattgggctaaaagacacgtgggaaaatgttcaacttcactaataacaaaagaaatgcaaattttaagaaccaggtaccgtttcatctataaaatttgcaaaagttaaaaatgtgtggcctggcgcagtggctcatgcctataattccagcactttgggaggccaaggtgggtggatcatgaggtcaggagttcgagaccagcctggccaaagtggtgaaactccgtctctactaaaaatacaaaaaattagctgggcatggtggcaggcacctgtaatcccagctacttgggaggctgaggcagagaattgcgtgaacctgggaggcgaagtttgcagtgagccgagattgcaccactgtgctccagcctgggcaacagagcaagactccatctcaaaaaaaaaaaaaaaaaagggttgggggtggtgagaaaatacccagtattggcaagcatgcagtgtggtggctgtctttatgccctgctagtggtgggctaaattgatgccacttttagggaaaccatctggtgatgcgtatcaatcatattcctgttaaattatcctaagaaagttatccagaacataacacaaatttattcacaatgatgcagcgttatttataagaaaaaatgggaataacttaagtatcaaaaaatatgagactggttaaataaatgataatatattctcacagtagaacactaatgcaactgttgggaaagatgctttgtgggccaggtgcggtggctcacacctgtaatcccagtactttgggaggccgaggcgggcagatcatgaggtcaggagattgagaccatcctggctaacatggtgaaaccccgtctctactaaaaataaaaaaaaattagccaggtgtggtggcgggtgcctgcagtcccagctactcgggaggctgaggcaggagaatggcgtgaacccgggaggtggagcttgcagtgagccgagatcgcgccactgtactccagcctggtgacagagcgagactgcacctcaaaaaaaaaaaaaaaaaaaagatgctttgttaagttttctagtaccacgagaaaatgctttttttacaatccaggctggggtgcagtggtgcaatcttggcctccccagttcaaatgattcttgtgcctcagcctccctactgggattacaggtgtgtgccagcacacccagctaattttttaatatttttagtagagatgggtttttgccatgttagccaagctggtctcgaactcctggcctcatgtgatccacccacctgggtctcccaaagtgttgtgggccactgcgcctggcctattacaatgttaattaaaaggtgcaaaatacaaaattgtatttgcagtcatccctcagtagctgtggaagattggttctaggactccccctgtccccacagataccaaaatccacaatatacaagttccttctttttatgttgttgctttttttttttttgagacagagtttcactcttgtcgcccaggctggagtgcagtggcacgatctcggctcactgcaacctctgcctcctgggttcaagcgattctcctgcttcagcctcctgagtagctgggattacaggcaggtaccaccacacccagctaatttttgtatttttggtagagatgggtttcaccatgttggccaggatggtctcaaactgctgacctcaggtgatccccccgcctcggtctcccaaagtgctggtattacaggcgtgagccactgtgcctggccacaagttcctaatataaaataatgtagtatttgcatgcaacctactgacatcctcccatatactttaaatcatctctaggttacttataatacctaatgcaatgtaaatgctatgtgaatagtagttttactgtattgtttaggaaataatgacaggacaaaaaaacctgtgcatgttcagtacaaatgcagccatcctttcctttttcaaatattttcaatctgtagttggttgaatcccaggatgcagaactcacagttacaaagagctgactgtacattctaatctcagttatgttaaaaaataaaacgtagaaacaagaaagggataaaacatattaattcgttaacaatggttgtcttgaaataattggtaatttttttcttcttcccttttcctcttatttatctgtaataataatatactgtctttagaataaaaattgtatttaggcaggatgcagtggctcatgcctataatctcagcactttaggaggtcgaggcaggaggattgcttgagctcaggagtttgaaacgggcctgggtagcatagtgagactctatctctacaaaaaatttaaattatttatttatctgtgagacagagtctcactttgtcgcccaggctggagtgcagtggcacaatctcggctcactgcaaactctgcctcctggggctcaaacaattctcctgcctcagcctccctagtagctgggattacaggtgcacaccactgcgctcaggtaatttttgtatttttagtagagaggaggtttcaccatgttggttgggctggtcttgaactcctgacctcaaatgatcttcccgcctcaacctcccaaagtactgagattataggcatgagccaccatgcctggcaaaatttttaaaaatgttttaaattttattgaaaaatcatgagcagctacagtaatcaagtctgtatggtactgtatggaacagaccagaaagttcagaaataaactgttagctttatggtcaattgattttcaaaaagggtgctcagacaattcagtgaggaaaaaaatcatcttttcaataaattgtgctgggacaactggatatctacatgcaaaagaagaaagttggaccccttctttacaccacatacaaaaactaactaaagtggatcatagacctaaatgtaaaagctaaaactatgaaatttttagaagaaaacgagagtaaatctttatgatcttaagtcagagaaagtcttcttagatatgacaccaaaaacccaaacaacaacaaaaataaattggacatcatcaaaattaaatacttttgtgcttcaaaagacagaaacaagaaagtgaaaaaactcacagaatatgagaaaatatttgcaaaccatatatctgataagggacttgtatccaaaataaataaagagctctaacaactcaacaataaaaagataaatgatccaattgaaaaatgggcaaaagtccggtctcagtgactcaggcctgtaatcccagccctttgggaggccaaggcgggtggatcacctgaggttgggagtttgagaccaccctgaccaacatggtgaaaccctatctctactaaagctacaaaattggctgggcgtggtggcacatgcccgtaatcccagctcgttgggaggctgaggtaggagagtcgcttgaacccaggaggcagaggttgtggtgatccgagctcaccattccactccagcctgagcaacaagagcgaaactccgtctcaaaaaaaaaaaaaagaaagaaagaaagaaagaaaagaaagaaaaaaaaatggggaaagatttgaatagaaatttctgcaaagaagatatataaatattgctgccgtaacaaatgtagtggcttaacccaataccactttattatcttacagttctggaagtcaggagctcaacatgggtagaaatggaaagtgactgctaatgagtatagggctcctttttggggtgaggaaaatatcctaaaattaattgtagtgatttttttggtagagacaatgtttcatcatgttgcccaggctggtctcaaacttctgggctcaagtgatctgcctgcttccgtggttgcacagctctgtaaataaactaaaaaaccgttttgtatgtaccccatcttgggttgtttgggattttcttgtttgtttgttgttttgttttgtttttgttttattttgttttgttttgtgacagggtctcactttgtcacccaggcacatacaggctggagtgcagtggtaccatcacaactcactgaagcttcaacctcctggacccaagggattctcccacctcagcctcccaagtagctgagacacaggcatgcgccaccatacctggctaattttgttaagaaatgaggtctctctgtgttgcacagtctggtctccaactccagggctcaagtgattgccccacttccgcctctcaaagtgcgggattataggcatgagccaccacacccagcctgtatgtgtactttaaatgggtacattgcatggtatgtaaactacgtctcaataaagctgttaaaaaataacaaatgaggccagacgtggtggcttctgcctgtaatcccagcactttgggaggccaaggcaggcggatcacaaggtcaagagatcgagaccatcctggccaacatggcgaaaccctgtctctactaaaaatacaaaaacttagccaggtgtggtggcacgtgcctatagtcccagctactcgggaggctgagtcaggagaattgcttgaacctgggaggtggaggttgcagtgagccaagaccatgccactgcatgccagcctgggagacagagtcttactctgtctcaaaaaacaaaaacaaaaacaaataaacaaaaaaaacaaatgaatgactcctaagtaggatgctgtatcaatttaacaaaaacacaccacaaatggacttaaagaataaaggaaatgtattggctcatttaactgaaaagtatagaggaaataaagactttaggtgtggtacagtcaaaacctccttccccagcagttggagctccaactgtacatgctgctacacagttgagggagagtgaaatggatattgtggagacaacacccactatgaccatccactatggtcctaagggcaaagagaaaacaggtggctcacggctgggcgcagtggctcatacctgtaatcccagcactttgggaggtcgaggcaggcagatcacttgagtccaggagtttgagactagcctgggaaacatggcctgtctctataaagaatacaaaaaatttagctgggtgtggtggcacacgtctatagcactagcctgggcgacagagtgacaccctgtctctacattttttaaataaataaataaattgaaaaaatatatagtaaaaaagaagaaaacagaagggcaggcctggcatggtggctcattcctgtaatcccggcatttttggaggctaagatgggaggatcacttgagactttgagaacagcctgggcaacatatgaagaccccatcgctataaaaaaattttttttaatactttgggaggccaaggcaggcagatcacttaagcccaggagtttgagaccagctgggcaacatggtgaaaccttgtctctactaaaaaacaaacaaacaaacaaaacaatttttttaatcaaaaagaagggctaggcacggtggtttactcctgtaatcccagcactttgggaggccaaggcaggcagatcatctgaggtcgggagttggagaccagcctggccaacatggtgaaaccccatctctactaagaatacaaaaattagccaagtgtggtggcatgcgcctgtaatcccagctatgtgggaggctgaggtgggaggatcacttgagcccaggaggcgaaggttgcggtgagccaagattgcaccactacactccagcctgggtgacagagcgagactgtgtctcaaaaaataataataaaataaataaataaatcaaaaagaaaataaagaaagaaaacagaagggcaagttcaaagacaaatagcagagcatgtgtgtaccagtcataggagcaattctcaggagggcgaagccctctttagactaaaaagagaaacaactaaagactgtaataaagaacactgtcctttaggccggtcgcggtggctcacgcctgtaatcccagcactttgggaggctgaggcgggcagatcacaaggtcaggagattgcgaccatcctggctaacatggtgaaaccctgtctctactaaaaatacaaaaaattagccagacgtgctggcaggcacctgtagtcccagctactctggagaatgaggcagcagaacggcatgaacccgggaggcagagcttgcagtgagccgagatcgtgccactgcactccagcctgggtgacagagtgagactctgtctcaaaaaaaaataaaaaataaaaagacactgtcctttaaacacttcaaaagtgtttaggattgactgctaatggagtatgaaaatgttctaaaattagatggtagtgatggttccacaggcttgtaaatatactaaaaaagattgaggtctagcacggtggctcacacctgtaatcccaacactttgggaggctgaggaggtcagatcacctgaggagttcaagaccagcctgaccaaaatggcgaaatcctgtctctaccaaaaaatacaaaaaaattagccaggtgtgatggtgcacacctgaagccccaactactcaggaagctgaggtgggagaattgcttgaaccaggatgtggaggttgcagtgagctgagatcttgccactgcactccagcctgggcgacagagtgagacactgcctcaaaaaaaaaaaaaagttaatgatcgctgggtgcagtggctcatgcctgtaatcccagcactttgggaggctgaggcgggtggatcacctgaggtcagcagttcaagaccagcctggccaacatggtgaaaccccgtctctactaaaaacacaaaaattagccgggcatgatggtgggtgcctgtagtcccagctacttgggaggctgaggtgggagaatcacttgaatctgggaggcggaggtttcagtgagctgtgatcacgccattgtgctccagtctgggcaacaagaaagactctgtctcaaaaaaaaaaaaaaaaaaaaaaagattgaattgtacacttgaatatgtgtattcttttttttttctttgagacggagtctcactctgtcgctcaggctggagtgcagtggtgagatctctgctcactgcaagctccgcctcccgggttcacgccattctcctgcctcagcctcccaagtatctgggactgcaggcacctgccaccacgcccggctaattttttgtatttttagtagagacagggtttcaccatgttagccaggatggtcttgatctcctgacctcgtgatccacctgcctcggcctcccaacgtgctgggattacaggcatgagccaccgcgcccagccaagtatgtgtattctttaaatgatatgtgatggaccaggcacagtgtctcatgcctgtaagcccagcagttggggaggctgaggtgggagaatcacttgagcccaggagtttgagaccagcctaggcaacgtagtgagaccccatctctactaaaaaaacaaaattagctgtgcatgatagtgtatgcatctgtagtcccagctacttggaaggaggcaggaggattgcttgagcccaggtgattgaggctgcagtgagctttgaccgtaccactgcactccagcctgggagacagagtgacatgctgtctcagaaaaaaaaaaaaacaaacttaaataatatgtgaattctacttcaatgaagctggatttcatagtttagagcaagtaggtaagatattaatctagtgcttgggcacatggagccaggagaaaggagttaaatgtaaactgaagcccaaagtgtgggaaagatagtaagtgagcctctgtgtatttcaaggagttcaagactcttgggcccagataaattacctcctagggcactgaaagaacttgtaggtgtagtaattatttaaactaatttatgagaaattatggagaattgggtgagagaagaaaagttttggagacaagtacacatggatttttttttttttgagatggagtctcactctgtcccccaggatggagtccagtggcatgatcccgacttactgcaacctctgcctcccaggttcaagcgattctcctgcctcagcctcccgagtagctgggactacaggcatgtgccaccacgtccagctaatttttgtaattttagtagagatgggggtttcaccattttggccagaatggtctcgatctcttgacctcatgatccacccacttcggcctcccaaagtgctgggattacaagcatcagccaccgcacccagcccccaaacgtggatttatttattttgtgtgtttgtatatgtttagttttattgtaacaaaccaacttgtacatttttgttttgttttgtttttgtttttgtttttgagacagtctcactctgttgccctggctggagtgcagtggcatgatctcagctcactgcagcctttgcctcccgggttcaagtgattctactgcctcagcctccccagtagctgggactgcaggtgcacgccaccacacctggccaatttatttttatttttatttttatttttagtagagacaggatttcgccatgttggccaagctggtcccaaactcctgacctcagttaatccaccctccttggcctcccaaagtgctgggattgcaggtgtgagccactgcgcctggccacaaggcaacttgtacatttttaacgtttaaaactgagcatctgggccaggggttgtggctacctgctgtaatcccagccctttgggaggccccagctggaagatggcttgagttcaggggtttgagatcagcctgggcaacatggtgaaactccatctctacaaaaaatacaaaaattagccaggcatggtggcacacacctgtactcccagctactagggaggctgaggttggaggatggattgagcctgggaggttgaggcttcagtgagctgtgattgccttattgcactctagcctaggtgacagagcaagatcttgtatcaaaaaaagaagtaagtaggccaggcacggtggctcacacttgtaatcccagcactttgggaggccgaggcaggtggatcatgaggtcaggagtttgagaccagcctggccaatatggtgaaactccgtctctactaaaaatacaaaaattagccaggcgtggtgacacatgcctgtagtcccagctactcgggaggctgaggcagaagaatagcttgaactcaggagacggaggttgcaatgaactgagatcacatcactgcactccagcctgggcgacagagtgagactccatctctaaataaataaataaatgtaaaactttattttaaaagtgttatcttggccaggcgtcgtggctcacgcttgtaatcctagcactttgggaggccaaggtgggcagattatctgaggtcaggagttcgagaccagcctggccaagttggtgatctctactaaaaatacaaaaattagctgggcgtggcatgcgcctatagtcccagctactggggaggctgaggcgggagaatagcttgaacccgggaggtggaggttgcagtgagccaaggttgtgccagtgcaccctagcctggtgacagagtgagactccgtctcaaaaaaaaaaaaaaaatcaaaaattagcctggcatggttgtgcatgcctgtaatgccagccagctactcaggaggttgaggcaggagaatcacttgaacccaagaggcagaggttgcagtgagctgatatcatgtcactgcactccagcctgggcgacacagtgaaactccatctcaaaataaaagtgttatcttaacaatgtctgttaaacaatatcattaaatatgccaaaggagaagccatgttgtcaaaatgcctacttaacccaccgaaatatctcaaattctccctttgctgattttctataaccctgttttttaaaggtttttttctccctttttttttaatgagatacagtctcactcttttccccaggctggagtgcagtggcacaatctcggctcattgcaacctccacctcccaggtttaaatgattctcctgcccgagcctcctgtgtagcagggattacaagcatccgccaccatgcccggctaatttttgtatttttagtagagacagggtttcaccattttggccaggctggtctcaaactcctgacctcaagtgatccacccaccttagcctcccaaagtgccggaattacagatgtgagccaccgcgcccagtctcaattcacatttaactcccttctcctggcctttttttcctttttttaaacaagagaaagtagatggatacatgttggtaaatgctaactgtccatgttcacatagagacacagtgaactctctgagcccaatacacagagaaaggaggaaaaaagcaagaattctaagcataactacataggggcctagcacccccgagcttccagcagagcgaaggaagtaggtttttcttttcttccacagagcttggtggtgttgattccgtacagtttttgttcagacaggaagggataaaaatgaatttgggatggaaagggatagactcttttcccactctgttctgctcaaggtgcatccccccaaaataacacccatggtataaataaaagaaacctcaggaacagtgtgactgggcacaagagggaaaaaacaaaaagaccgcaacttgatcccagaaaatggggaacattttttaaaaggaaggttggaatccatcagtgttctattagccatctcctctttcatcctcctctcctttgtcagtatcttccaacccttcatcatcatcatcttcttctttttctttatcatccgtatcaggaaccaagtagagctgtaatgagtttggccaaatatcatctttgatgacctctcctaactctccagcacccgcatcagaatgatcagtgaaccaggtaaaaaagctctccaattcctcactctggctgtattctgtgtctgacttgaatgctttatcaaatcccctccagatttccatttgattgcagtggactttgaagatggatcaccactctcattcaggtgaaattctttggagaactttattttcatagtaagaattttcatcaaaacaaacatctattctgtaatctaataaatatcttcatattctgtcaattcaactctggtcaaataatgcagtgcctctttatcctcctccctaagcagtgtaaacacttgtggatggttgacaaatattgttaccccaaaatttgggattttggcaatcaactctgatctctttggaaaaaatggttggcggagtttgccatatttctttttctagcttcaaaatctcctcactggcttgttcattaagtctatttcattttgtactttatcaataagttcagttgcttccgctggtttttttctgtcttcttctgcaagcccagagagatggatgtcttctctggtctcagagcacaaggcagacttggtttcttcttttgaggcagtagtagagactggcatttcagggccgtgctgctagaaaagtccaacaaccagaccacgagtctcattgctcaacagaatgaagctcagaaaaccacccacagatttttttaaagtggtatggatagaatgaaagtgaaaggagtccttccagaacccttaataaaatcaagcctatttccaagaagataaattctaaaaggtagggacctcatctgtgtattcacgacagtaccctcagctcctaacaggccccaaatatttgtttaaggttgagtgttgactcctccagggttgaccacggagagagatccctggtgcacagtagaaagtggggaagtaagggtacaaggtgaatcgtgggcaaaaaagtcttggtgaaagtttgggttttgggaggttttcattgttattgttacaaattttggttttgaatttggttaaatgttttttatgcatctgagataatcatatggtttttctcctttattctattaacatggcgaattacgttaattgattttcaaatgttaaacccagcttgcattcctagaataaactcactttggaaggctgtgttatcctttttacatattgctgagttcaatttgctaatattttgttaacaattaactcaccagggcctaagattttaaatttcaaatccagtttatttaattgatataggactactcagatattttatttcttcttgagtcagtgtggtcatttgtgtccttccaggaatttattcatttcatttatgttgttaaatttatattgataaaaagttgttcataatgttctattatcttttcaatgtctgtagaaacaataacgaagtgccctcttttacttggaccaaaaactaaatcttgggataagagtcaaaacttggggctgccaggcacggtggctgacacctataagctcagtaccttgggaggctgaggcaggagaattgcttgagtccaggagtttgacaccatcctgggcaacatagtgagaccccatctctttaaaaagtaaaaagttagccaggcatggtgttgcaatcctgtcatcccagctactcaggaggctgaagtaggaagatcatttgggcccaggagttccaggctgcagtgagccctgatcctgccactacactccagcctgggtgacaaagcaagactctgtctctaaaaataaacacattaaatataaactacagggcctagcgtggtggctcacgcctgtaattccagcactttgggaggccgaggcaggcggatcactaggtcaggagattgagaccatcctggctaacacggtgaaaccctgtctctactaaaaatacaaaaactagctgggcatggtggcaagggcctttagtcccagctactcgggaggctgaggcagctgaatggcgtgaacccaggaggcggagcttgcagtgagccaagatcttgccgctgcacgccagcctggagatggtccaagtgcagtggtgttacaactaatttatcacaaccagtcacagatttatttattccttctccactccctactgcttcacttgactagccaaacaacaacaacaacaacaaaaaaccatggaattctaggcaaatcagttccacacatagcaattggctgctacgcctgttaattctcctgagctgctttttccctccgttgccagccttagaggatcagttttttatttaacgttgttaagaagaaaggggctaggccgggcgctgtggctcaggcctgtaatcccagcactttgggaggccaaggcggggggatcacgaggtgaggagatgaagaccgtcctggctaacacggtgaaaccccgtctctactaaaaatacaaaaaattagccgggcgttctggcgggcacctgtaatcccagctactccgggggctgaggcaggagaattgcttgaacccaggaggcaaaggttgcagtgagccaagatcgtgccactgcactccagcctgggcgacagagctagactctatctccaatccaaaaaaaaaaaaaaaaaagaagaagaagaagaagaaaggggccaggcgcagcggcttatgcctgtaatcccagcactttgggaggccaaggcgggtggatcatttgaggtcaggagttcgagaccagcctgactaacatgatgaaaccccgtctccactaaaaatacaaaaattagccaggcgtggtggcatgcacctgtaatcccagctacttgggaggctgaggctcaagaattgcttaagcccaggaggcaggggtttcaggaagccaagatcatgccactgcactccagcctgggtgacagagtgagactctgtctgaaaaaagcaaaacaaaataaaacaaaaaagaagaaaggggccaggcgcaatggcacacactgtaaccccagcactttgggaggctgaagtgggcagatcgcttgagcccaggaatttgagaccagcctgggcaatatggcaaaaccccttctctacaaaaaaaaaaaaaaaaaaaaaaaaaaaaaattagccaggtgtggtggtgggcatctgtggtcccagctacatgggaggctgaggcatgaggattgattgaacccggaggtcaaggctgcagtaagccatgttcgtatcactgtactccagcctgggtgacatagtgagaccctgtctcagaaaaaaagaataagaagaatgagagaggtagactccagaaatgacaaatggcaagctcaatgttgatcttttttttttttttttttttttttttgagacggagtctcgctctgtcgcccaggctggagtgcagtggcgggatctcggctcactgcaagctccgcctcccgggttcacgccattctcctgcctcagcctcccaagtagctgggactacaggcgcccgccactacgcccggctaattttttgtattttcagtagagacggggtttcaccgttttagccgggatggtctcgatctcctgacctcgtgatccgcccgcctcggcctcccaaagttctgggattacaggcgtgagccaccgcgcccggccaatgttgatcttaagtgaaattctagaatggaatttgtgggcaacacaaaaaaaatttggtggttctgagagctgtcacatattcactaagagcaattttgctgaactttatttccttcttgtcaaagtatctgtctcccttgcacagtcagattgtttacactagtagttaccgagggccaatttcgtacccagcattgtgctaagagtgtagatagatacaataggggtgaaccaaaaggacatccccccttcccttacaatgtagtgagggacaattgttaaaccaataagcacgtgaataaatataccactataaactgtgagaaggggtatgaaggatggtagaatggtgggagagtttcacaggaagatctgatttagatttggcagcaggcagaaggttggtctaaggaaagcctttaagaggaactcctatttaaagataagtaagaggccgggcgtggtggctcaaacctgcaatcccagcactttgggaggccgaggtgggtggatcatgaggtcaggagtttgagactcgcctggccaatatggtgaaaccctatctctactaaaaataaaaaataaaaaaaaaatagccgggcctggtggtgcatgcctgcagtcccagctactcgggaggctgaggcaaaagaattgcttgaactcgagaggcagaggttgcagtgagccaagatcgcaccactgcactccagcctgggcgacagagtgagattccgtctcaaaaataaataaataaataaataataaaataaaataaagataagtaagagttagccagggaagtagtagcagaaagagtattcttttttttgagacagagtctcgctctgttgcccaggctggagtgcaatggcacgatttcagctcactgcaacctccacctcctgggttcaagcaattctcctgcctcagcctcccaagtagctgagattacaggcacacgtcaccacgcctggctaatttttgtatttttagtaaaaacggggtttcaccatattggccaggctggtcttgaactcttgaccttgtgatccacccgcctaggcctcccaaagtgctgggattacaggcatgagccaccacgcccgaccaagagtttttttttttttttctgcaatggagtctcgctctgtcgcccaggctggagtgcaatggctcgatctcggctcactgcaatctccacctcccagcttcaagtgattctcccgcctcagccttctgagtagctgagattacaggcatgcatcaccatacccagctaatttttttatttttagtagagacagggtttcaccatattggccaggctggtctcaaactcctggcctcatgtgatccacctgcctcagcctcccaaagtgctgggctgaaaaatattctgagcagagtaaacagcatgggcaaagaccttgagtcaggaaagtgatgagtttgaggaactgagagaaggctgatgtcactggaaagcagtaggagagtgagagttggagctggagggtgaacaggtcaaaattatgcaagctttaaagggcacaaagaggttggcttttatcctaggggtgctagaaagtcatcaaagtagtttgtgcaggaatgtagcccaaatgatccagttttggtttggaaaaatttaaacataggcagtggctcatgcctgtaaccctagcacttcgggaggccaaggcaggcaaatcagttgaggtcaggagtttgaaaccagctggccaacatggtgaaatcctgtctctagtaaaaatgaaaaaattagcctgatgtgtcagcaggcacctgtaatcccagctactcaggaggctgaggtacgagaatcacatgaagcaggggggcagaggttgcagtgaggcaaaatcgtgccactgcactccagcctgggcaacagagtgagactccgactgaaaaaaaacttttttttaacttatatgagaatagacacggttatattatagcacccaaaatacccatcaatggcttcaaattatcattttatggccaatttttaggatttgggaataaaatagaaattcccaggaattctcagaaattcttgatattaaaaactattccgtattttcataacactttatttaatgttttaaatgttagtatgcaagattgtcaaagaaaaagactttttttaatttttaaatttttttgagacatggtctctctctgtcacctaggctggagtgcagtgttgcgatctcagctcactgcaacctctgccttgtgggttcgagcgattctcccgcctcaacctccctcccaaagtgctggaattaaaggcatgagtcactgtgcccagccaaaaaagttaacattcttaaaataaaaaacataaacatgcaggctgggcgcggtggctcacgcctgtaatcccagccctttgggaggctgaggcgggcggatcacaaggtcaagagatcgagaccatcctggctaaccccgtgaaaccccgtctctactaaaaatacaaaaaattagccgggcgtggtggcgggtgcctgtagtcccagctactcgggaggctgaggcaggagaatggcgtgaacccaggaggcagagcttgcagtgagccgagatcgcgccactgcactccagcctgggcgacagagcaagatccatctcaaaaataaataaataaataaataaataaataaataaataaataaaataaaaattgccaatgagcattattgactagcattcaaataatctaacattgagctctcctaacactatacagaatcccagattaaaattcccaatttttgtatttaccaaaatttgttacttcttggatcaccactcattggatttatataaagcaaactgtgcatataaactcattactatttattttacttgcagaaatgcctgtgcttagcagcagacagggccatgagcacatacttctgacatggcagtgaaggcgaattgacagggatgggttcatgctatgttttggagtgggcaacaccatcaggatattacaactcttttttaaaaaaagttttaattgtttaaataaatttttaattttaatttttgtgggtacatagtaggtgtatatatttatgggatacatgagatgttttgatataggcatgcaatgattatacaacccattttaatagtctcaatgcgctccatcatcattttgttgacacagtaacagtctgagctaacaggatgggtattagaaactaagaaggaaccgggcgcagtggctcacgcctgtaatcccagcactttgggaggccgaggcaggtggatcacctgaggtcaggagttcaagaccagcctgaccaacatggagaaaccccgtctctactaaaaatacaaaattagctggggtggtggcgcatgcctatgatcccagttactcgggaggctgaggcaggagaatcgcttgaacccaggaggcggaggttgcggtgagccaagatcgtgccattgcacccagcctgggcaaaaagagcgaaacgccgtctcaaaaaaaaaaaaagaaaagaaaaagaaactaagagggaaataaggccgggcgtggtgtctcatgcttgtaatcccagcactttcagaggccaaggagggtggatcacttgaggccaggaattcaagaccagtctggctaacatggtaaaaccgcatctctacccaaaatacaaaagttagccaggcttggtgggacacgcctgtaatcctaactactcgggaggctgaggcaggagaatcacttcaaaccaggaggtggaggttacagagagctgagattatgccactgcatcccatcctgagtgacagagactctgtctgaaaaaaagaaagaaagaaagaaaagaaactaagagggaaatgagattggatagttggggtgggtgaggactctcagaaaggagggagggcttcccagcagaagaggcgtgttttcgtgcgtaagaagtggctggggaaagcgaaagcagtgggggcacccatgatgagactggctggctctagaaacattagtgggatttcacccacacttgcttgggtaactttctgttgtcattgggaagccagtgggactttctcgtccaagatgaaccagggcccatacacttgccactttcacttgttcctagaggctgtgtcatgtcttggctgcctcagggtgcagggactatgctcatatagtaggaaggtaacggcatacacaaattaggtgattacaggtctcacacttgtcagttggctccattcaatttcatacttggttctttctcttccatgatctctattttgtttcttgaacagaccaggactctgtaagctgaaacgtttggtaaattcccttccttgccagtttacactgactttgtacccacagttcaaggctaaatccctttttgtctgggctagtggttgccaaatccctttttgtctgggttagccatttcatgtagagactgcttctctacctatacgcttattcaaatgcagtagtgaaacaaaatcaatgcacagccatacaattactacatagcctgtgtaaagaatgatgcagatctatttatatacaaatatggtaagctccataatatattattagatttttaaaaagtaagtctccagacaacatttatagtagtgttttgcgtgtgtgtgtttataattgcatagatatagttctggaaggatacatggtaaactcaactctaacaagtgtgtatatgacaggaatgaaataactctactttttagtttgttttaaaagtattttaatttgcaagcatcacttctataatgtgaaacaaaaattaaaaacctcaaaccgttgctcttcttggagtcacttgaattggtagccctgaagaaaattcctaaattagactttcttctgttcttgactgaacgaggatgaatgagtcacccaatcctgtgccaggtacaggaataaatgctggacagttacagatgaaagagagcatgttgccctttaaggacttcaaagtttacagagagaccagaaaacaagaaattaaagtacagtatgatatatgccacagagctataccttggaaagaaaaaggatggacagcacagactttaaagcagtaacaggaggtgggtaggaaagccttccagagaaggtaagaatcgagaggagtcttttattttccctgttactttattattaaaaaatgtcaaacataactgaaaggttgaaacatctgcagatccaccacctagattcaacgattgaacattttgttgtattcactagatatgtaatacaaataaacaaatgcaaagccatttgaagtttcacccctaaatatttaaaccccaactcctaagaatgacattatcttacataaccacaatgccgttatcaaacataaaaataacattaagggctgggcatggtggctcacgcctgtaatcccagcatggtgactcaggcctataatcccagcactttgggaggctgaggcagtggatcaccaggtcaggagttcgagaccagcctggccaacacggtgaaactccatctctactaaaaatacaaaaaattagccaggtgtggtggcaggcgcctgtaatcccagatactcgggaggctgaggcaggagaatcgcttgaacctgggaggtggaggttgcagtgagccaagactatgccactgcactccagcatgggagacacagcgagactctgtctcaaaaaaaaaaaaaggcaaaaatgaacccccccgattagctgggacaacaggcatgccccaaaacacccagctaatttttgttttttaagtaaaaatgaggtttcaccaaattggccaggctggtctcaaacttctgacctcgtgatccacccgcctcagcctcccaaagtgctgggattacaggcgtgggccaccacacctagccacaagtattattctctaaatgtcattgtggttagatgtggtgacagaagtgttagtgagctctagcttgtccttgctttgctctgatcagtgtccagaaatgctttccaattcctgaccctgttgaccaccagtgaccaccagacacttggtgatggatccacagaggtggcggctgcccagatggctctccaggagccttctcatcacagccccatgtcagtggccagatgcacttccctccccacattggtgactcctcttttgattctctgactaacctcttggtctttcctttccccagcttcttctacaattgtgtaaagcatagttcccataataaattccttatctcatcattcatgaaggttctacctccctgactgatacacttactggtactggccgtggtttcaggggacagatcattaaggataggaattggaaactggttctctgacctgattaaacttaagtgcattcatgattgttgccagcagtaaacttaaattcttaaactctacctgtaatcacttgtgatacatgcttatagacggcaaagctttgggtagccaaatatttgctgctgtagaacattttagtagaaataggaatgtaatgaggaatgttggttgcttctacatatggggaaagtttggagaaagaaaatgatgagctaaaggctttaaatttccatctcaagttctggaaaatggaccaaaaaacttgaagactgcctttaaaaaaaactctcatctctgatagcctcaaggtcaagatttctgatcaccaaacactaagtgtccacttgcagcagactgaatttcaacgcaaagtgaattc

SEQ ID NO: 10 - DNA, 199321 bp, Homo sapiens
gaattcaccttgagaaagacccaaaggccagtcagggggtggggggaactcagctaaatagacctagttactgccctgctaggccatgctgtactgtgagcccctcctcactctctaccaaccctaaaccctgaggacaggggaggaacccacagcttccttctcctgccagctgcagatggtttgccttgcctttccaccccctaattgtcaaccacaaaaatgagaaattcctcttctagctcagccttgagtccattgccaaattttcagcacacctgccagcaacttgggggaataagcgaaggtttccctacaagagggaaagaaggcaaaaacggcacagctatctccaaacacatctgagttcatttcaaaagtgaccaagggaatctccgcacaaaagtgcagattgaggaattgtgatgggtcattcccaagaatcccccaaggggcatcccaaatccctgaggagtaacagctgcaaacctggtcagttctcagtgagagccagctcacttatagctttgctgctagaacctgttgtggctgcatttcctggtggccagtgacaactgtgtaaccagaatagctgcatggcgctgaccctttggccggaacttggtctcttggctccctccttggccacccaccacctctcgcacagcccctctgtttttacaccaataacaagaattaagggggaagccctggcagctatacgttttcaaccagactcctttgccgggacccagcccgccaccctgctcgcctccgtcaaacccccggccaatgcagtgagcaccatgtagctcccttgatttaaaaaaaataaaaaataaaaaaaaaaggaaaaaaaaatacaacacacacacaaaaataaaaaaaatattctaatgaatgtatctttctaaaggactgacgttcaatcaaatatctgaaaatactaaaggtcaaaaccttgtcagatgttaacttctaagttcggtttgggattttttttttttaatagaaatcaagttgtttttgtttttaaggaaaagcgggtcattgcaaagggctgggtgtaattttatgtttcatttccttcattttaaagcaatacaaggttatggagcagatggttttgtgccgaatcatgaatactagtcaagtcacacactctggaaacttgcaactttttgtttgttttggttttcaaataaatataaatatgatatatataggaactaatatagtaatgcaccatgtaacaaagcctagttcagtccatggcttttaattctcttaacactatagataaggattgtgttacagttgctagtagcggcaggaagatgtcaggctcactttcctctgattcccgaaatggggggaacctctaaccataaaggaatggtagaacagtccattcctcggatcagagaaaaatgcagacatggtgtcacctggatttttttctgcccatgaatgttgccagtcagtacctgtcctccttgtttctctatttttggttatgaatgttggggttaccacctgcatttaggggaaaattgtgttctgtgctttcctggtatcttgttccgaggtactctagttctgtctttcaaccaagaaaatagaattgtggtgtttcttttattgaacttttaacagtctctttagtaaatacaggtagttgaataattgtttcaagagctcaacagatgacaagcttcttttctagaaataagacattttttgacaactttatcatgtataacagatctgttttttttccttgtgttcttccaagcttctggttagagaaaaagagaaaaaaaaaaaaggaaaatgtgtctaaagtccatcagtgttaactccctgtgacagggatgaaggaaaatactttaatagttcaaaaaataataatgctgaaagctctctacgaaagactgaatgtaaaagtaaaaagtgtacatagttgtaaaaaaaaggagtttttaaacatgtttattttctatgcacttttttttatttaagtgatagtttaattaataaacatgtcaagtttattgctgcacatggttaagcttccttttggctttggttggagagggtggagaaaagcgggaggggcatggcctgtgacctggtcacaaagtaccttccacagtcctttactttaaggtggcatcactaaattattccctgtagcccaccttcaggtccactccacactggctctcttgactattttcttcctttattcatcagtgatgtatgttcaggacctaattaattgtggatatgaggcagggtcaagaggacaaaggaacagggcctttaccttctacatagctcccctgtttcatccaaggaggttaagtattgatttttatcggttttctcaactgtgaatataataaactgaaagcatttcagggagaagctggagaacaccttctctagctgcactccaccttaaggctgaagctggatttgtttactgtttctcctgggggcaggggcagttgagaaataaccaagtagtctgccaagccagggtcaaccctccaggccacaggttgagcaaatgctacagccatggacagggagacactcctcacgaaggggtggtcctcatcctttcagatcaacttcctgctggaggctccaccctcaccacgtccctccctcttctctcatctggagtcaccttttgggattttggagttgagcaccatggggactccaaatgatcaggcagtgctgcaggccatcttcaaccctgacaccccatttggagacattgttggattggacctcggagaggaagcagaaaaggaagaacgagaagaaggtgggcatttgatctggagtgtagctctgcacataggctggcctgctggcctcccgaggtagcagagagggaggtggttttataaggccccttgttccatgattatgattgagattggaatcagagaggttggctgctccttagcgcactgatgggggtttggtaagagatgtcctgccaagaggagtaagctggggtttgtctctcgatccatcagctctcatgcctctgaacttaccacttaattgactgtatgatccaagcttaactgccaggtgatgttaaactctcacatttttgtcataacagagaataccaccaccagaacagaagactgaaataaggcagggcatggttgctcagttgagtggttccaatatagcaagcacaaccagtaaccgttaaacactgtcacaagccaagctccaaactaactcttccgcagtgagtgcgttcactggcttttccattaatccctaatgaaggagtttttgatcctttgtttctagaggagtaaagcctacaccttactaactcaggccgaaacacagagggatacgtcagaagtgatgttcatgatctgggaatgtcatggtggcctttgcataagaggcggtgtagtagagtaaaatgcagacaggagccagaatgacctgggttcaaatccaagctctgcaacgtatggcctgttgaggccatacacaaagaacttgagcaacttctttaacagattgaggagtctgggcttcattctcttggcaatggggaaccaaccaaggccccttcccaggtctcttggaactcaggcaatgctagctcccagccttagtgacctcatctccccctaccccaaacactgcaactgacccctgctgtgacccatacccagtcagctctggctcagatctcagaattccaaagcctgaggtggctttttcttcttgctaccaactgcacacctggcttctcctggctccttccctggcccagatgaagttttccctcaagcacagctggaacagtccaaggccctggagctgcagggggtgatggcagcagaggctggggacctcagcacagccctggagaggtttggccaagccatctgcctgctgcctgagagggcttcagcctacaacaaccgtgcccaggcccggcgactccagggagacgtggcaggtaaggggagatgccctgtatcctctgcaaaagggcccacgggagggcacagaccagaactgaagtggctgtgcggctggggtggccttgctaaacccctgtggagcctgtcttcttacctataaggtaggagtagtatcaggggacctgctaatatcatggggttaatgtgaaattcagaagagactgcattccattgattaaggaacagttaatgagagcctactatgtggcagtaggctggtgctgaggacactgagataaaaggtatatggatcaccaacatttatatagcagtcactatgtaccaggcattaatcactttacatacaaactagtaaatcaatcctcacaacaaccctaaaaagtatgtactattgttatccccagtttatagatgaagaaactgaagcatgaagaggctaagtaacttgcccactatcatacagtcaggcagcagcagagctgggatgtcaaccaggtggtagggctcgagtgtgtgctcttaatccccacatgatactgctcctcgaaaagctcccagtccaggaggcagggcagacacataattctgagaccagcaaaacaagttcgagaggggtcagcgtgggacctgttcctgaagggcgagttttgaaggatgagtgggagttagttggtgggtggagaaggtacagtctgtagaggtccaaaactcctgctgcattcaggttattctaattaagtgaagacaatgggaccatgctggggaccaaagatgaggctaatgtgaaggtataaaccacggaaacctagtactacttgactgttaggagcagtggtgacacaggtgctcccagaaccagcaatgccaggctagggagttttgagtccactccaggaacaatgggaacctcccaggagccccttatccaggcttatctgccccagatcactggagacagcctgcagaccaaaaccccagagagatgcagtggtgattccaactggagattcctccagaccagctcctccgagggaaaccaaggagtactgcattctgagcgcttctccggaggctcaggctctttgggggactagagaacatgagtgaattgaagcagagcccgaaagaagccagcctggtggactttaagaaggtggctggctgcctgaagttctgagttcagagttctgaggcccaacccaagtattttatgagaataataacaataaaaatggtgcaggccagctctggctccaggaccaaggaaattagatacatggagataaccaaagaatgatgaaaggcaatcagtccaggatacaggggagagagaaggtgttctaaagaaagcaatggaaaagagaaaacggccctcaaaaggaaaacaatgagaaactgtcttgattgtacttgtaagaaatgattgtgcggttaatattattttttgaaccctgacattcagagtcagtcacctggcacatagtggatgcttaataacaggtgtggaataaattggctgctacttgcccgggcagtgggccagactcataaacatagtggccattcagaatcctgcaacgttcatgttttcgtgtattagcggtggaaaataataggaacaaggcgagacctggacttcagtcccagctctgccactaagtggcttggctgtagagcttaactcttccacagtcttcatctgtgtaatgggaataacgatccgtacctctagcaggtgcgaggcgggttgtaaatggccacgcccgggagccgcaagaaccacggtgatccgcgcggccgcaggtgggctggggctcgggcaaggccgccctggcctccgctgacccccgccccgcccgtctcgtcggtcccgcaggcgccctggaggatctggaacgcgcggtggagctgagcggcggccggggccgcgccgcccgccagagctttgtgcagcgcggactcctggcgcggctgcagggccgagacgacgacgcccgcagggacttcgagagggcggcacggctgggcagccccttcgcgcggcgccagctggtgctgctcaacccctacgccgcgctgtgcaaccgcatgctggccgacatgatggggcagctgcgccgcccccgtgacagccgctgagcgccgcggacccgggcgtccgcgggcgaggggacgggactgggccctgaaccaataaagccgtcgggcctcaccgactccgcctgctcctgcgtcctgcccgcgcccggagagaagggcactcgggggtactcggcgcgggctggggaccagccggggggtggtgagccgcggccgcccacctgccgggtaagggcccctcgggcccgtggtcgggcatcgattggccccgcctggcgcagcccccgcccctgcagcggactgcggtgctcatcagacctgagcagttgctccggcggcgctcggggagggagccaggtgagccgccccggtggcggggggcgggggcgggatgctcggcgaccccaccctccgaccctctcctcttccgccgacatccaccggagccaccaacatcaggaaagggggcgtagggcgagggatgggagagagaacagggcaggagagaggatgggaacagggcaggagagagaataggattaggagaaaggcgatccctttgggggaggggcgcgtggagtatgtgtgtgagtgtgcgtgtgtgcaaggtgtggttgcacggatgctcgttgcttctgcgtatctgcgggtgtgtgcctctttgtattgtagcctggagtcagtgctcgcttctgcgcctgcaggatgtccatgtgtctgctgggtgggtctgtgcctttgggctttgccgttcgtgtccgtgccttcgccactgggggctggtctacatttgcgtttccgtacatggttctttttgtttctggagagtaaattcctggagcaattgctaggcctgcctgctgtcacctggctgacaggcccgcccccttctctcagcagcctagggcctaggcccgggccaccatggcgctgcctccaggcccagccgccctccggcacacactgctgctcctgccagcccttctgagctcaggtacacccctgttcagtcgttgaccaagtccttctgggttccaaagccccctctctcccctgtctgcacttctgtttgggtacccactccaggccccaagccctggagtccctgtccccttcacccacctaccctaggtccaaccagccagtccctggtgagaggactcaggtgccctttcctttggcctgctgctcttctcactgggccaattcctggtcacagcacagtaccaaccgtgcctgagcccttcccagaggcctcctgctgtgttccaggttggggggagttggagccacaaatagatggtcagacctgggctgagcgggcacttcgggagaatgaacgccacgccttcacctgccgggtggcaggggggcctggcacccccagattggcctggtatctggatggacagctgcaggaggccagcacctcaagactgctgagcgtgggaggggaggccttctctggaggcaccagcaccttcactgtcactgcccatcgggcccagcatgagctcaactgctctctgcaggaccccagaagtggccgatcagccaacgcctctgtcatccttaatgtgcaatgtgagtggccctgaggtgggcagggagataggttctttgcccagggacccccagcacccaccaggcaggtggtccgcaggacatttagcagacacttaagcactttgcaaatatgaactcatttgatcctctgagtaaccccatgaggtcattactattgtcgtcaccattttacaaataagaaaactgaggcagaaagaggtaagcaatctgcccagggtgatgatcccgctggtaagaagcagagccaggattcacatctgggcatttggctctagtatttacactcataatcactccgaaatgctgcctctctggcagacccagccatcctgttcctcagcatcccctctgaggagaggcccaggcccctggctcccatctgggtttgggaagaaagggctagaagtatgaggggctgtggtgagagcatattggcctctgctttgtaccagtcaagccagagattgcccaagtcggcgccaagtaccaggaagctcagggcccaggcctcctggttgtcctgtttgccctggtgcgtgccaacccgccggccaatgtcacctggatcgaccaggatgggccagtgactgtcaacacctctgacttcctggtgctggatgcgcagaactacccctggctcaccaaccacacggtgcagctgcagctccgcagcctggcacacaacctctcggtggtggccaccaatgacgtgggtgtcaccagtgcgtcgcttccagccccaggtgagcatggccagcaagcggccctgcaaagcttcaggtgggctcaggggtcccgtccccatacagaaatgggaatacttgttgccctgtggttgggtcttgtggatgaactgtccccagccaccctgggcaaggagggcagagtagtacctatggcatgttggggctggggcactacccacttgggacctgacacagaggacatcctccagggcttctggctacccgggtggaagtgccactgctgggcattgttgtggctgctgggcttgcactgggcaccctcgtggggttcagcaccttggtggcctgcctggtctgcagaaaagagaagaaaaccaaaggtaggccagggacactgggggcagtgtggatgaggtcaggctgagcagcagccaagacagcaagtgcagctgggcagaaccagtcatctctgacggtggcagagcacttccagggggtggccatgggtacggtgacatgcatcccaggtagcagggtcaagcactgggaacccagtctctggccccagggccaggcctgggcatttgagagaccccttgcctgagggtcctgggtctgaaagggtaggacagcccagcgtgggagggcacactgagaattagggacatggtttctttctccacaggcccctcccggcacccatctctgatatcaaggtaactcttccttgggctgggtggacaagcctaaccgaaatgcaggatggggacaggagggagcctggggtttctggtagaggcagccatgagtgcctgtgccgggactcatatccatcccgaactttgtcctccctgtagtgactccaacaacctaaaactcaacaacgtgcgcctgccacgggagaacatgtccctcccgtccaaccttcagctcaatgacctcactccagattccagaggtatatctagggccctgctctttgcccctgcttaatctccagaagtgcttctgagaaaaagaacttggtgcttgggaggggcgaggcctcatcaggcacactcctcgtcctgaacactgccctctttgtcaaccagcagtgaaaccagcagaccggcagatggctcagaacaacagccggccagagcttctggacccggagcccggcggcctcctcaccagccaaggtactggggaaggggcctgccaccctcctcctctgccccccagccctgtgcttatgccagaggcctccaagtgcccaggaggcagagagagctctccaaattccaaggaacaagcgttactgagtccccgcgggcttctttgatcccgcaggtttcatccgcctcccagtgctgggctatatctatcgagtgtccagcgtgagcagtgatgagatctggctctgagccgagggcgagacaggagtattctcttggcctctggacaccctcccgttcctccaaggcatcctctacctagctaggtcaccaacgtgaagaagttatgccactgccacttttgcttgccctcctggctggggtgccctccatgtcatgcacgtgatgcatttcactgggctgtaacccgcaggggcacaggtatctttggcaaggctaccagttggacgtaagcccctcatgctgactcagggtgggccctgcatgtgatgactgggcccttccagagggagctctttggccaggggtgttcagatgtcatccagcatccaagtgtggcatggcctgctgtataccccaccccagtactccacagcaccttgtacagtaggcatgggggcgtgcctgtgtgggggacagggagggccctgcatggattttcctccttcctatgctatgtagccttgttccctcaggtaaaatttaggaccctgctagctgtgcagaacccaattgccctttgcacagaaaccaacccctgacccagcggtaccggccaagcacaaacgtcctttttgctgcacacgtctctgcccttcacttcttctcttctgtccccacctcctcttgggaattctaggttacacgttggaccttctctactacttcactgggcactagacttttctattggcctgtgccatcgcccagtattagcacaagttagggaggaagaggcaggcgatgagtctagtagcacccaggacggcttgtagctatgcatcattttcctacggcgttagcactttaagcacatcccctaggggagggggtgagtgaggggcccagagccctctttgtggcttccccacgtttggccttctgggattcactgtgagtgtcctgagctctcggggttgatggtttttctctcagcatgtctcctccaccacgggaccccagccctgaccaacccatggttgcctcatcagcaggaaggtgcccttcctggaggatggtcgccacaggcacataattcaacagtgtggaagctttaggggaacatggagaaagaaggagaccacataccccaaagtgacctaagaacactttaaaaagcaacatgtaaatgattggaaattaatatagtacagaatatatttttcccttgttgagatcttcttttgtaatgtttttcatgttactgcctagggcggtgctgagcacacagcaagtttaataaacttgactgaattcatttacatatctctgcttcatttcttctattaatatgtttttgtttttgttttattttgtttcgtttgagatggagtctcactctgtcgcccaggctggagtgcagcggcgcgatcttggctcactgcaacctccgcctcccagattcaaacgattctcctgcctcagcctcccaagtagctgggactgtagacgcctaccaccacgcccatctaatttttatatttttagtagagatggggttttaccatgttggccagactggtctcgaactcctgacctcaagtgatctgcccacctcggcctcccaaagtgctgggagtacaggtgtgagccaccacacccagccttctaatatgcttttcttttcttttttttttttgagacagagttttgctcatgttgcccaggctggagtgcaatggcgtgatctcggctcaccgcaacctctgcctcctgggttcaagtgattctcctgcctcagccttccaagtagctgggattacaggcatgcaccaccatgcccagctaattttgtatttttagtagagatggggtttctccatgttggtcaggctggtcttgaactcccgacctcaggtgatccacccgcctcagcctcccaaagtgctgggattacaggcatgagccacactgcgcccggcctaatatgttttttaaatgaagttttccagtctcacagtggaaaaaatatagcaagcacctgtatacccaccactcaactctgacattaccaaatgtgcttcagaaaaataaataatatttctttaattatagtgttcccaatggccggattggcattttctatttcaggggctcttggctataactagcatctgattctcacttggtcctcactcagctgcttcttcccacctcaggactgggctaaagtatgctgagcccctttgtcctgcccttgggaacagaaggctcagactgggatgtgatttttttttgtacaaagttatgaggttcattgaaattttgtaacatatctatgtatgtatgtgtatatacagagagagcgcaagagagcacgtgtgtgtgtgtcttgctctatgactcaggctggagtgcagtggtgcaatcatagctcactgcagccttgaactcctgtgttcaagggatcctcccacctcagcctcatgactagttggaactgcaggtgtgtgccattgtgctcagctaattaaaaaaatttggagggggcaggcatggtggctcacgcctgtaatcctagcactttgggaggccgaggcgggtggattgcctgagctcagaagttcgagaccagcctgggcaacatggtgaaaccccatctctactaaaatataaaaaattagcctggcatggtagcatgtgcctgtggtcccagctactcgggaggctgaggcaggagaaatgctggaacccaggaggcagagattgcagtgagccgagatcgcgccaatgcactccagcctggatgacagagcaagactccgtccaaaaaaaaaaaattcgtagagacagggtctcactctattgcccaggctggtgtgacatgtgtataatgtgtagtaatcaggttaggatattcaaggtgtccattacccaagtacaatacacttttgttaactatactcaccccactctgctatcaagcattgaatttattccaactatatgtttgtaccctttaactcacttcttttgtttatcccacattttccttcacccacattttcttcacccattcatcagttgatggacacttaggttgattctggatatttgctattgtgaatagtgcagcaataaacatgaaagtgcaggcatctctttgatattttgatttcttttcctttttggagatacccggaagtaggattgctggattgaatggtaatcctatttttagtttctgagaaattacaggccgggtgtggtgactcatacctgtaaccctagcactttgggaggccgaggcgggtggatcgcttgaacccaggagttcaagaccagcctgggcaacatggtgagagtcccatctctacaaaaacacaaaaattagctgggcgtggtggtgtgtacctgtagtgccagctacttgggaggctgaggcaagaggatcacttcagcccaggaggcagaggatgcagtgactgagatcactccactgcactccagcctgggccacagagtgagaccctgtctccaaagaaaagagagaatccccatatggttttccatagtggttgtactagtttacattcccaccaatataagagtataagagttcccttttctcctcatcctcatcaatatctgtaattattattatttgtttatttttttgagacagagtcttgctctgtcacccaggctggagtgcaggggtacgatctcagctcactgcaacctctacctcccaggttcaagcaattcttctgcctcagcctccccagtagctggcactacaggcgtgcaccacgcctggctaatttttgtatttttactagagatgaggtttcaccatattggccaggctggtcttgaactcctgacctcgtgatctgcccaactctgcctcccaaagtgctgggattacaggcgtgagccactgcgccaggctttgtctttttaataatagccgttctgattggggtaagcttgtatctcattgtggttttgatttgcatttctctgatgattagtgatgttgagcattttctcatatacctgttagccgtttgtatgtcttcttttgagaaatgtcggccaggcatggtggttcacacctgtaatcccagcactttgggaggccgaggcaggtggatcacttgcactcaggagtttgacaccagcctggccaacatggcaaaaccccatctctactaaaaatacaaaaaatagctgggcatggtggcatgtagctgcaatcccagctacttgggaggctgaggcaggagaatcgcttgtaccaggaggcagaggttgcagtgagctgagatcatgccactgcactccagcctgggcaacagagtaaggccgtctcaaaaaaaaaaaaaaaaggaaatgtctattcttgtcctttgccaactttttaatggaattatttggtttcttttcctgttgagttgtttgaattccttgcatattctggatattaatcccctgttggatgaatagtttgtgaatattttctcccattcaacagattgtctcttcactctgttcattatttattttgctgtgcggaagctttttagtttaagacccatttgtctatttttgtttttgttgctgtgcgtttgaggtcttggtcataaattttttttttttttttttttttgagacggagtctcgctctgttgccaggctggaatgcagtggtgtgatctcggctcactgcaacctccacttcccgggttcaagcgattctcctgcctcaacctcccaagtagctggggctacaggtgcgtgccaccacacccagctaatttttgtatttttagtagagacagggtttcaccatgttggccagggtggtctcgatctcttgacctcgtgatccacctgccttggcctcccaaagtgctgggattacaggcatgagccaccgcgcctggccaggtcataaattttttgcctagaccaatgtccaggagagttttccctaggtttttttctagtatttttatagtttcaggtcttatgtttaagtctttaatctattttgagttgatttttatataccatgagagatagggggtccagtttcgttcttctgcaggtggctatccaattttcccagcaccatgtattgtggagggtgtactttcccaagtgtaagttttcattggctctgtcgatgggctgtgattttttctttattttaatttttggtcaggcacagtcattcacacctgtaataccagtactttgggaggcagaggtgggcagatcacttgaggccaggagttcgagaccagcctagccaacatggtgaaactccatctttactaaaaatacaaaaattagccaggcatggtggtgtgcacctgtagtcccagctactcaggaggctgaggcatgagaattgcttgaacccgggaggcggaggttgcagtgagccgatatcatgccactgcactccggcctgggcgacagagcaagactccgtctcaaaaaaaaaaaaaaaaaaattacattggagaatcatgaggtgggaaaagcctagaaatgggatgacgttttgagcgcagatttatcttctggtttttgtttttgtttgagacagagtctcgctctgttgcccaggctggagtgcagtggcgcaatctcggctcactgcaagctccgcctcccgggttcttgccattctcctgcctcagcctccccactagctgggactacgggttggcttggcttccatggctgtgggggcttctggttcatgccctttcctcctttctctcttgttcagtgttttcctccatagaatggctaaggccgtgccagccacctgaaaggagctgagttctagcctctactgattttgcgtgtgagctccttgccactccaaaatttttcttagccagagggccttgctgtcacttcttttgacttgctcatccatgctccctcagaaggtcctggggctcttcctttgatagccccttggcaagactgcaagctctgagctcctctcagctgcacccaaggtcttaattatcagaaagtttactcttcctgacaaggcttccatcttgccaaatattcagtagggggtggactggcaaactactgtcccaattctcgatacacatcccttagatcagggattccttgttcctttgtcgggtgacagacccattggagaagttgatgaaagccaaacactctttttttcagaagacacagataagagactcctgcttgttatgcagatcaaaacctagcagattacaacatgaaagaaccttgatgacattatgccaagtgaaaggccaaacccaaaagatcacacgttgtttgactccatttatatgaaatgtccagagtaggcaaatctgcagagtcagagagcaagttagtggttgccagggtctggggggagggcagaatggggagtgactactggtgaatatggggttcttttttggggtgatgaaaatgttctggaattcgtagtgatagatgcacaactttgtgaacatactaaaaacacttacacgaggatgaacttatggtatgtgagttagatctcaataaagctgttgtttaaaaactgatcaaatgttaatttgatttgtacttttcactgtttagaaatttcacctaacaggccaggcgccgtggctcatgcctgtaatcccagcactttgggaggccaaggcgggcggatcatgaggtcaagagatcgagaccatcctggccaacacagtgaaaccccgtctctactaaaaatacaaaaaattagccgagtgtggtggtgggcacctgtagtcctaactactcgggaggctgaggcaggagaatggcttgaacctgggaggcggagcttgcagtgagccaagattgcgccactgcactccagcctgggtgacagagcgagaccctgtctcaaaaaaaaaaaaaaaaaagaaaaagaaacttcacctaacaaaagaagaatgtcttagtccattttttgttacttataacaatacctaaaactgggtcatttattaaaaacaaattttttaaaaaaaattcagcttttattttagatacacagggtacatgtgcaggattgttacctggtatcacaccaggtagtgagcatagtatccaataggtagtttttcaaccactctagtggtccacagtgtctgttcttcccatgtttatgtccatgtgtgctccatgtttagctctcacttatttttatatatgttttaagacagggtctcattctgtcacccaggctggagtgcagtggcacaatcacggctcactgcagcctcgacctcccgggcttaatcgatcctcctacctcagcctctcgagtagctgggaccacaggtgtataccatcatgcctggctaattttgtattttttgtagagacgtggtttcacttcgttccccggctggtctcaaacgtttgggctcaagcagtcctccggcttcagcctcccaaagtgctgggattacaggtgtgactcactgtgcctggcctttttagctcccacttacaagtaagaacatgcactgtttggttttttgttcctgcgttaattcgcttagaattctgggggccgggaagtacacggttgaggggtacatctggtgagggtctttttgcttgtggggactctgcagaattctgaggcaatgcagagcatcacatggcaagggggctggacatgctaagtcaggtctctcttcttataaagccaccagtcccactcccatgataagccgccaatgcatttaatacccattaatctataagtggattaatccactcatcagggcagagccctcgtgacccaaacacctcttaaaggccccacttcttgatatggccgcattgaggattaaatttcaacatgagttttggaggggacaaataggcaaacaatagcaaatcataaataaatattgagggccaggcgcagtggctcatgcctataatcccagcactttgggaggccaagaccagaggatgagttgaggccaggagttggagaccagcccgggcaacataacaagaacttgtctctacaaaaaaatatatatataaaaattaagcctgggcacagtggcttactcctataatcccagcactttgggaggccaaggcaggcagatcacctaaaggcaggaattcaagaccagcctgggcaacatggtgaaaccccttctctactaaaaatacaaaaattagccagccgtggtggtgcatgcctgtaatcccagctactggggaggctgaggcaggagaattgcttgaacccagaaggcagaggctgcggtatgccaagatcgcaccactgcactccagcctcggtgacagagcgagactctgtctcaaacaaacaaacaaaacaaaacaaaaaaccaaaaatttgctgggtgaggctgggcgcagtggctcatgcctgtaatcccagcactttgggaggctgaggcagtcggatcatgaggtcagcagattgagaccaccctggctaacacggtgaaactccatctctactgaaaatacaaaacaaattagccgggtgtagtggtgcatgcctgtaatcccagctactcgggaggcataggcaggagaatcgcttgaacccgggaggtggaggttgctgtaagcctcagttttgtcagctcaaagtttgtcatcagctcaaacgtgcctgctccttaaactcaagcatgatgatcatagttaaagggtttgtaagaaacagttcctctcctacccatgtgtttattgtgtatctattaggctgatggtatcgattttgttttgttttgtttttttagacagcacctctgctaccagcgccggcaatgactaccacccctttgacttttatgttcctcagtaccctccgttctcccttttgctccttcagcctctacaacacttttgtaaccaatttatcatattattatatatttttttgagaaagagttttgctctgttgcccaggctggagtgcagtggcgcgatcttggctcgctgcaactgccacctcctgggttcaagtgattctcctgtcagcctcccgagtagctgagattacaggtgcccaccaccacacccagctaattctttgtatttttagtagagacagggtttcaccatgttggccaggccagtcttgaactgctgacctcaagtgatccacccgcctcagcctcccaaagtgctgggattacaggcatgagccactgcacctggccaattccccatattaaacaccccctttttttttttttttgagatgcagttttgctttgttgcccaagctggagtgcagtgccacgatcttagctcactgtaacctccacctcacggattcaagtgattcttctgcctcagtctcctgactagctgggactacaggcatgcaccaaaacacccggctaacttttgtattattagtagaggtggggtttcaccatattattggccaggctggtctcgaactcctgaccacatgatctgcctgcctgggcctcccaaagttctgggattacaggcgtgagccactgtgcctggctaaacaccctttgttagaaataactagcatggtttcagacttcctgactggagcttggctgacataactccaaaatatttactgaatctgtccatctctactactgccaccccaatcacctctcacctggattaccgcaatagctacgctccctgagaccagaaccagacaggtctggagccagacagcctcaggaaggcggcattaactgaagagagacccttagaaaaattaaattccagaggaaaaatgattcccctcgactgccaatcttggaggattggggtttcattttatttcacaaaatttgtttgctttaactactcttcatttaatgcccattactaagcaaagttcctgtgtctctgcgttatgctcagtcagccttttctctttcatattaaatagcagaataatctgacaatataatagagcatttgatttataaaatctttactcactaactttacgaatgaaagaaaacaattccatccctctcacaaaaaggacatcttttaagctttcctcccaatctaacctccatgggatctcagaaattccaattcttataactcaaatccccacagtggtgtagatgcattaactccccggggacagcaatctgaggcaggcaggttcattaaacaaacatgttctgtgccctctggcagagagggcagcaggacatgcactgcccctgagccaagctgtggcatgggcaaggacatcaagtagctgacaacgatctgtccatctcagctggggcagaggggccagctcagccttgaaacagcagcttgggaagtgtctcagctgaaggttaatgtctccatgtctccagcttgggaggtggaattggatgaaggagtgaatgctttcttgccttcagcgagagctttaaaatgctgcaaggaagaggagagggaatattgagtattagggatatgctaattgctatattttaacaagaattaatttctttaaaatgaaccccctttatttccttcctgcttccattcatgagggaacttggttctgaaagaacgagtgtcctctgtagatcctcacctgatttcatctaaggcccacaactcctacttccacccacccttttttttcctccactttccccttgaaaactccatccctgcctcctttgctctcctaattatgggaaagggcgaaggtaactgggcagagacatcctacatcgctataggatgcaatcacagcaggctcagaacagtagaaactatagtgatcctctctacagcttaagtcaacccctgatgcttggctcacctgtgagttcttgaattctgagtagagggaaaagagcagatggagggactggatccgactcttgtagacagggatgtctagaatggctgaaacgaagaagaacttccaggaacagaagcaaacaaactccgggaattagaggcccttctgtctagcacaggcaaagccctggcagatggggtgtcgctatgactttgggggttaaatacccagcaggtagtcacataagccaaacaccacctttgagtgctgccaaagagcacaacgggcttaaagtgaaggctgaaactcaagatactatcttcccagagtaaacaagcctgtccaaaagcctagagtgtctctatccagagatggggacgaggaaaggaaagaggaactcaccacagatcatgtcaatgtactctgccaggctgcaatcaatctctgccgtgggcaggcttacctggaaggggcatggaaggaccaaagtcaaaaggatggtgtcagtggtcccagaaccactctctctctctgaagcaaaagagcttctagcataagacacaggttatgggctgaaatgtgttcccctaaaattcagatattgagttcctaactccctgtacttcagaatgtgactatatttggagataacatctttaaagagataattaaattaaaacaaggtcattagggtgggccttaatccagtatgactggtgtccttataggaagaagaaatcaggacaaagacgcataacagagggaagaccatgggaagacacagaagatggccaagaagagacccctcagaagaaatcaatcttggtggggcgtggtggcttcacgcctgtaataccagcactgtgggaggttgaggtgggcagatcgcctgagcctaggagttcgagaccagcctgggcaacatggtgaaattccatctctacaaaaaaattagccgggtgtggtgttgagtatctgtagtcccagctacttgggaggctggggtgggaggactgcttgagtccagcaggttgaggctgcagtgagctgagattgagctactgcactccagcctgggcatagagtaataccctgtaaaaaaaaaggaaggaagggagggagggaatcaaccatgccaacaaattgatcttggactactactggactactagcctccagaactatgaaataatacatttctgatgtctaagccactcagtctatggtactttgttatggcagcctagcaaaataatacaacatgctattttttcccccgatcagtatggaattggtcatatgttttataggtaaaatacactgccatactcttttcctgtgggaatctgtgaaaaagaaactgataccaagttatgggcaagtattaacagttatatatgcattacttggtgttataatgcctaatgattccaggacaccatatgaacagagaaaatgggcatgacatctaactcaggtaacaggctctggatctaaacaagtcacagtgtgaagtttttaaactactggtttcttaaaacttttctctttttacaaaaaacagagtacatatagttctgcaacttgctgcaatttgcttttttcatttaacaacatatcactgatatttcttcatattagagcaaaataaggccaaataatattccattgcatagtatttcactgaatggatgtactgcaacctagctattcaatcccctaatcagacaccttcccctcaactacagcttcaaaatgctctgaggaaagagactgtttccaaattctgtgtgtttacaatcaattcttcatatacaaaaaaaatctgtctttgtagagcttacattttagtagggaagaacaaaataagtaaataaagtctatggtatgttagaagataagtgttatcaagaaaaagcagggacagagggcggggaatgctggggagctggtgcagcagtttaaacatgatggctaggaaggacctgttggtcatctttgttcagtttccttttctgttttgatactttaaaaaaattcttttttgagacggagtcttgctctgttgcccagactggagtgcagtggcatgatcttggctctctgcaacctccacttcctggattcaagcaattctcctgtctcagcctcctgagtagctgggattacagatgtgcgccaccaggcccggctaatttttttgtgttttcaatagagacaggggtctcaccatgttggccaggctggtctcaaactccagacctcaggtgatccacctgcctcagcctcccaaagtgctgggattacaggcatgagccaccgtgtccagctccttttacttttcttttcttttcttttttttttttttttttttgagacagagtctcactctttcgcccaggctggagtgtagtggcgctatcttggctcactacaatctccgtctcccgggttcacgccattctcctgcctcagcctcccaagtagctgggactataggcgcccgccacagcgcccggctaattttttgtatttttagtagagacggggtttcaccatgttagccaggatggtctcgatctcctgacttcgtgatccgcccgcctcggcctcccaaagtgctgggattacaggcgtgagccaccacgcccagccttttttttttttttttttaatagagaagagtctcttattgttgcccaggctggtcctgaactcctggcctcaaatgatcatcccacctcagcctcccaaagtgctgggattacaggtgtgagctaccgtgcctggcccagtttccttttcttattaatatataagagctctttgcttggacggtaattttttctattacatacatatataaaatattttttctcagactgccactgtcttttaactttgtttatggtgtctattggtatgtagaacctttcatttctatgagtttaaactgtcacattttctccattacgactttttttttttttttttggacagagtctcactctgtcatgaggctggaatacagtggcgcgatcttggctcactgcaacctccgcctcccgggttcaagcgattctcctggctcagtcttccgagtagctgggactacaggcgtgcatcaccatgcctggctaatttttgtatttttagtagagatggggtttcaccacgttggccaggatggtcttgatctcttgacctcacgatccgcccgcctcggcctcccaaagtgctgggattacattacaggtgtgcgccaccatgcccagctaatttttctatttttagtagagatggggtttcaccatgttggctggatggtcttgatctcttgacctcttgcctcgccctcccaaagtgctgggattacaggtgtgagccactgcacctggccttttttttttcttttaatagagatgggtctatgttgcccagactggtctcaaactcctgggctcaagcaatcctcccattttggcctcccactccattatgacttttttttttttttttggagatggagtcttgctctattacccaggctggagtgcagtgatgcaatcttggctcactgcaacatctgcacccctcctgggttcaagagattctcctgcctcagcctcctgagtagctgggattacaggtgcctgccacaacacccagctatttttttaatttttttagtagaaacggggttttgccatgttggccaggctggtcttgaactcctggcctcaggtgatgcgcccacctcagcctcccaaagtgctgggattataggtatgagccaccatgtccagctccttttttcttttcttttttttttgtagagaagagtctcctattgttgcccagaccggtcctgaactcctggcctcaagtgatcgtcccacctcagcctcccaaagtgctgggatttacaggtatgagctaccgtgcctggcccagtttcctttccttattgatatataagagctctttgcttggacagtaattttttctattacatacatatataaaatattttttctcagactgctactgtcttttaactttgtttatggtatctattggtatgtagaacctttcatttctatgagtttaaactgtcacattttctccattatgactttttttttttttttttgagacagagtctcgctctgtcaccaggctggagtgcagtggcacgatctcggctcactgcaatctctgcctcccaggttcaagcgattctcctggctcagcctcccgagtagctgagactacaggtgtgcaccaccacgcctggctaattattgtatttctagtagagatggggtttcaccatgttggctaggatggtctcgatctcttgacctcatgatcagcccgcctcggcctcccaaagtgctgggattacaggcgtgagccactgtggctggccttttcttttggttttaacagagatgggtctatgttgcccaggctggtctcaaactcctgggctcaagcaatcctcccatctcagcctcccactccattatgacttttttttttttttttgagatggagtctcgctctattacccaggctggagtgtagttgctcaatctttgctcactgcaacctccgtgccctcctctgcccctgggttcaagtgattctcctgcctcagcctcccaagtagctgggattacaggcacacaccaccacacccagctaatttttgtatttttttagtagagatggggtttcgccatgttggccaggctggtctcaaactcttgacctcaggtgatctacctgcctcggcctcccaaagtgctgggattacaggtgtgagccaccgcgcctggcctaagccactgcacccggcctcaatatgacttttaagtttcttattacactgagaaacacctaactatcctaatagaattaaatttccctaagttataagacacttgaattttttaaaaagagataattaaatttctcctatattttatttcatttattttttcagtcatgctccttctgtatctcctatattttattatattacttacatggctttatttttacaataactctttttttcccttcttttatttatttgtttatttttggaaacagagtttccttatgctgcccacgctggtcctgagctcaagcaatcttcacgcctcagcctcccaaaattataggactacaggcatgagccactgtgcccggcccacattaactctttaattcatctgaaattcacatatgtatacagttgaggcagaaacctactttaatttttttcaaataattgtctcattataccctaattctatcaccaatcatttaaaaaactatctttcttggccaggcgcggtggctcacgcctataatcccagcactttgggaggcagaggcgggtggatcacgaggtcaggagttcaagaccagcctggccaagatggtgaaaccccgtctctactaaaaatacaaaaattagccaggcacagtggcagatgcctgtaatcccagctacttgggaggctgaggcaggagaattgcttgaacctgcggggggtacggaggttgcagtgagccaagatcatgccactgcactccagcttgggcaacagagtgagactgcctcaaaaaaaaaaaaaaaaaactatctttcttatatatcaaattaccacatatacatgggtttcctgtgttaccattaaaaagttaatgaaatcctagcactttgggaggccaaggcagacggatcacttgaggtcaggaattcgagaccagcctggccaacatggtgaaaccctttctctactaaaatacaaaaattagcatggtggcatggtggcaggcacctgtaatcccagctactcgagaggctgaggcaggagaatcacttgaattgggaggtggaggttgccgtgagctgagatcatgccactgcactccagcctgggcgacagagagagactccatctcaacaaaaaaaattaatgatcgctgggtggagtggctcatgcctgtaatcccagcactttgggaggctgaggaaggaggactgcttgagcccaggagtttgagaacagcctgggcaacaaagcaagacctcgtctctaccaaaaattaaaaaaatggctgagtgtggtggtgcatgcctgtggtcccagctactggtaaggctgaggtgggagggtcacttgagcccgggaggtagaggctgcagtgagccatgatcatgccactgcactgcagcctgggaagagcaagaccctgtctcaaaaaaaaaaaaaaaaaaaagttaccaataataataatggaggaagagaaaaaacactgggccctggagcgaatactgtactttcttaccctacctcctgctaccttccactcaccttgcccaaaagctcttcaaactccggggaccattcctgcatcagcgtgtcaatgtcgggcatgggcctaaaagtataaaggtaaatatgaacaagaaacgtgaactgataacatcagcaacctctggatcagcatattctaggatgaaggagaggtcttcaatctggcacatcaggaaggcttcaggagaacctagactgggcataccaaagttacccagggcctggggtttggaggaggtagctaagtaatactagagaaattacaatctttatgtctacaatctcagccagtagttgccaggatccacaggacctcaggttgatcaaatatgttcccagcctctgggcctcttctcaggagcaacagttcacaggtagtgaaggttactatgtgttactgttgcaaagaatgtggtatttcttacctggtgtagtgcacagtcgcagggggcttagaacggtgtaattcagagatgctctcaatccacgtgtcaatggctttgggattcttttctgcatcttctaggctttttactttcatatgttgctaggaaagtaaggagaaagcctagctgatggcactgaagtagctctcttgtttttacagtgtctcattatatctgctgctgtttcatattcgagcttgctgatgacagctgctgccacgtgaaacagtagccaaatgaaggggatagaaaaccctgataaaatctgctgcagccaggccaggcatggcggtcacacttgtaatcctagcactttggcagtctgaggtgggaggatcagttgaggctaggagttcaagaccagcctgggcaacatagtgagaccttgtctgtactaaaaatttaaaaattagccaggcatggtggtgtgtgcctgtggtctcagctacttgagaggctgaggcaagaggatcacttgagcccaggcgtttgaggttgcagtgagctacgactgtgccactgcactccagcctaggcaagagcgagatcctgtctttaaaaaaaaaaaaagccaagtgcagtggctcacacctgcagtcctagcactttgggaggctgaggcaggaggatcacttgaggtcagcctagacaacatagggagaccctacctctataaaataaaaattaaaaaaaaaaaaaacctagccaggcatgatggcacacacctgtggtctgtcccggctacttgggaggctgaggtagcaggattgcttgcagatcgaggctacagtgagccccaatcacaccactgcactccagcctgggtaacagagcgagaccctgtctcaaaaaaaaataatttgctgaagccatggaaaggcagcaggtcaaaatggcaggactgaccataatgaaataccatttaggctgggcttggtggctcacacctataatcccagcactttgggaggccgaggtgggtggatcacctgaggtcaggagttcgagaccagcctgaccaacatggagaaaccctgactctactaaaaatacaaaatcagctgggcgtggtggtgcatgcctgtaatcccagctactcgggaggctgaggcaggaaaatcgcttgaacccgggaggtggaggttgtggtgagccaagatcacgccattgcactccagcctgggcaacaagagtaaaactgtctcaaaaaaaaaaaaaaagaaataccatttcacacctactaggatggttagaatgaaaaatacaaacaaaaagtattgatgaggatgtagagaaactggaactctcattcattgctggtgggaatgtaaaatggtacagccactttggaaaacagtttggtagttcttcaaatggctaaacatagagtttccatatggcccagcaattctactcctatgtatatacccaacagaataacaatatatacctacacaaaaacttgtatacaaatattcaaagcaccattattaataagagtggacagaactagagaatgaataaagcaaatctggtaaatccatacagtggatattattcagccataacaaaggaatgaaataattaccagggtctaggaggaagtgggagaatgaggagtgaatagtaatgggtatgaagtttctttttgaggtgatgaaatattctaaattaggtagtggtgatggctacaaaactgtgattatattaaaactaataagttgtacaatttaaaaggctaaacttgctggtatttaagttatatataaataaagctgtcatttaaaaatagagctggcccaaagcaataaccatctcttttttttttttttttgagatggagtctagctctgttgcccaggctggagtgcagtggcatgatctcgactcactgcaagctccgcctcccgggttcacaccattctcctgtctcagcctcctgagtagctgggactacaggcgcccgccactacaccctgctaatttttttttttgtatttttagtagagacggggtttcaccatgttaagccaggatggtctcgatctcctgacctcatgatccacccgcctcggcctcccaaagtgctgggattacaggcgtgagccaccgcacccaggcccatctcttttgacaggcagtaagtcaactgtatgagtgccagcaaggcctcctccactcttggccctctccagctggggcctatactaagctagtatcttactgtgatgttgtgctgcttagaattctctgttaaccagagtgagagcaccgtagggtctgactgctttgtagaaggttcatccaataccaataggccaaggttgtcaggctttccatcaggacgtgggacctggttaagaaaaaggtaagaaagcagaaaggaaaatgtttccaataagttaagaggaagaacacttctggttcatcattattactagtattaaaagcatgcttatcatgctgtacgcaatactatccagaaaaaaaatattatccatagcagcttaaatatgaacctgttgtcatagataattaggaagcaaatacatgacaaactgttaatgtgtaatgagatattaagtattacttaagagcaatgagtgtaatttggagttgagagcaaggttaagaactccaatgaaatgaacatgactagccaatgctagtcaaagaaattagggaaactgttaagagtaacaggggcatcagaagaaacacttaaggagtcattttcaggatgtactgactatacctttaagaatgcatcaatatccccgacagctgggataaaatcaggaatgaaaggcttcagtttgtggtccaggtcaatcaactgaggtgtgtacctaggagatattgccaagggaaggtggagacagtcagaaaaagttactttactattcaggctaaaaaaaaatctaaggggaatggccctgtttcagactagagataggaaaggtttggggcaaggtagggatagtggggtatggtgggaggtcctagtactcacctactgatgtactggaagagttccttaatttcagcagaaactggcaaatgctcatagtctgcagggtcataggccctgggaaaaggaaaacagtttgttcgaggtggccagagaagagcagaggtggcagggtcctaggtgctggtgtgttactgactatagggacatgatcctgaagctagcttctgcctctccaatatctgcctttcctggtggcttgcaaggcaactttaaggttgattgtacttaactctcaattatctctgactctgaaggacagaggtgcagaaaatccaaaacataatatttttttgatgttaaaatgtagcataaatggttttccttttttttaatgaaaggatgacaagaaaaggtagaacaagagattttagggctgggcgtggtggctcacacctgtaatcccagcacttttggaggccgaggcaggcggatcacctgaggtcaggagttcaagaccagcctggccaacatggttgaaaccctatctctactgaaaatacaaaaattagccaggtgtggtggtgcacacctgtagtcgcagctactcaggaggctgaggcagaagaatcacttgaacctggaaggcagaggttgcagtgagccaagatcgcaccactgcactccagcctgggtgacaaagcaagactctgtctcaaaaaaaaaaagagatttaaatatctgacatgaaaatagtttgcaccagaaaaaaaaaattatagaagtgtttttagcagtgttattattattttttaaatttaattaatttatttttgagacagggtctcactctgttgaccaggttggagtgcagtgacccgatcatagctcattgcagtctcaaactcctgagctcaagtgattctcctgcctcagcctcccgagcagccgggactatgggcacacaccagcatgctcagctaatttttaaaaaatttttgggcggccgggtgcagtggctcacgcctgtaatcccagcactttgggaggccgaggcgagcggatcacgaggtcaggagatcgagaccatcctggctaacacggtgaaacctcgtctctattaaaaatacaaaaaaaattagctgggcgtggtggcgggcacctgtagtcccagctactcaggaggctgaggcaggagaatggcgtgaacccaggaggcggagcttgcagtgagccgagatcacgccactgcactccagcctgggcgatagagcaagactctgtctcaaaaaaaaaataaaattttgtagagacgaggtcttgctatgttgcccaggttggtcttgaacgcccagccttaagcaatcctcctacctcagcctcccaaaatgctaggattacaggcttgagccaccatgcctggccaccacctttttgatttactcagcaaaatctcatgtaacccccaagcccacaaacgtttcagatagtaaagtgatactataggactggataaggtagtggagtcagaaagggaggaaaactcattattatgttgggtttctgagacatctgaaaatcctaaatacaggagatcaaaagagatgctggaatttcacttctaactgacgtcctcccactccagtgttttgaaggaggtattctgaagagcacccttggcttgggtgttctttcctcacccttccagaggggctccatgctcttcatcatcatcatcagaatcagaatcagtttcagatgaatcatcatcatcatcatcgtcatcctcattttcactaaagccccgttgaggtgtcaactgtgaggtcttcttcttctcctgtgatagggcagggcaggcatagaaagcttcaagtaaaaaaatcaaatgtacctatgcccagttctctattgctctaaccaatacaccaaccacctggcacctcgtcaccagaaagagaagggggcacttcccagaaggggcttgagagccttcttctgcccctgctcagctacaaatggggactccactttctagaaccctattccatttctctacttgaggctggggtataaattctaattttatctattgtacatattacttagatcttcagggccctgtgtacactttagacagcttcggcccgaaaagctatggactttcaaagaagaggatggcaactctagttattttggaagaaaatcagggaatatgaagtgggaatagaaattttaggggtcttaatactcacaaagaccatagagaggaaatctaatacttaatttgcaagactgcccagcataagctgcttgaaactatcaaaagaagaaagttcaaaatcaaccttgtgcccatcaaaccagcagtcccagggactatggactttccatttttgttcagtgatatttctcttcatggagtatctgacctatctgtatttcccttcccttaccccataaattacataaaatgactacacattctctctcaagataaacagctcttttgttcttgacattataacctacctttctgtgcttctggctctctctgtaccatcccaccctctcaagtacatgagaaggggtctggtggcacttgagacttgcaggggcaggtggaacagggtccatgtctttgcctctgtggcctggagcctgtggcatgccctcccttaggacctgaaggatgaccaattggccccctttaaaagtaggttttcaaaacttggtttctatataccgtatggcttatactgaggttaacacgtttgattccagttgtttaaaattaatttgtttttatggtaaagcagctattggcacacaaaattgtgacacgttacaggacaccaaaaactgcttttagtcacattttgctctaagaataacaaatttattatacataaagtatattctaactaagctgtaatatgcatggcagataatgaaacacagttgcagaatttattcagtgactatgccttattagtatatgactgataagaactttctagagcattctttctcaattcaagatttgccaaaattatccttagtcacataggaagcagttttggcagagggaacttttaagaatattgtcagcccggggtggtggctcatgcctgtaatcccagcactttgggagaccgaagcaggcggatcatgtggtcaggagttcgagaccagcctgaccaacatggtgaaaccccatctctaccaaaaatacaaaaattagccaggcgtggtggcgcacgcctgtaatcccagctactcaggaggctgaggcaggagaattgcttgaaccctggaggcggaggttgcagcgagctgaggtcatgccactacactccagcttaggcaacagagcgagatgactctgtctcaaaacaaaaacaaaaaccattaaaatgcagccatcaggctgggtacagtggctcacacctgtaatcccagcactttggaaggccaaggcaggaggatcacctgaggtcaggagttcaagaccagtgtggccaacatggcaaaaccccatctctactaaaaatacaaaaattagccaggcgagttggtgcaggcctgtgatcccccagctactcgggaggctgaggcatgagaattgcttgaacccaagaggcagaggttgcagtgagtcaagatcactgcactccagcctgggtgaaagagcaagactctgtctcaaaaaaaaaaaacaaacaaaaaaaacaggctgggcacagtggcttgtgcctgtaatcccagcaccttgggaggcctcccaagtagctgggattacaggcacccgccaccacgcccagctaattttttgtatttttattagagatggggtttcgccatgttggacagtctggtctcaaactcctgacctcaggtgatccgcccgcctcggcctcccaaagtgctgggattacaggagtgcgccaccacacccggccaacataaacggtttttaagaaatcatatgtgcaactctaaggtcctatatgtttctagagaggtgggcctcttgccatgtttctttcagaagcagggtgattctctaggtacacagaataacagcagccaacatctgggtcttaagacctcaaaattaaaatctccttcacaaaatactggcagtatcacaagtattgacaatgaaaaaatgcctagactgataatttcaaactcgctttagcataaaattacctggactgcttcctaaaaaatataaattcccaggcttttacttttgagattctgggctgggactgggaatccgtatatttaaaaataagtacctcagttgagtattatgatcaggaaagtttgtgaaacactggcctacattatgtgaaattcctcaccaaagtcaattgtagtagtaggctttattcctgaagaagggtcaaaatctcaaggctctttgtaactgattttcctccatgagctcaaaggtccctaacccctggaggtgagtgttcaagaaatgtttaccgttgaactggtgtcatctctaactactaaaaacccaaagcagaaattctacaagaagctgtgagttttactgtaccttgttattttcctcttcacactcatcactgctgttatcagccatagccttgttaggaagatgggcagaacgaggaagtccttagaaaaaaagtttttcctttagattattgttaaaatgatttttaaaaacaagtattttttagtttttaatattttatgctctaaccattttataaaacaaggtttattggaacatctggctaaagagacaggagactgaattctagtcatggctctgccagttcaattcaagatatatttactaaacattactgtgcttaaggcattgggttagacattatactattcaaattatctgccattacataaataatataaactctggccaggggcagtggctcatgcctataatcccaacactttgggaaggggaggcaggaggatcacttgagcccaggagtttgagcctagactggacaatatggcaagatcccatctacaaaaaaaaaaaaagaaaaaaaattagctgggtgtgatgccatgcgcctgtggtcccagctactcgggaggctgacgcaggaggtctgcttaaacccaggagttcgaggctgcagtgagcagtgtccagtgttcatgctgctgcactccagcccgggcaacagagtgagagcctgtcagaaacggaatgggaggggaagggaggggaggggaggggaggggaggggagggggaaaagaaaagaaagagaaaaatatacactctgcccttagtttacacattagtcaaattaggttaataactagtaaagtacagagtgctgaattcatactaagagtgggtttgaagaaaaattacttaaaatgattttgccttttcaccccctagcactgctgggccggcaggtctctgtcgagccgcaaacgcgggtctctgttccgcagaatggggtttattaaagttgttaagaataaagcctactttaagagataccaagtgaaatttagaagacgacgagagggtaaaactggttactatcctcagaaatgcttggtgatacaggataaaaataaatacaacacacccaaatataagatgatagttcgtgtaacaaacagagatatcatttgtcagactgcttatgcccgtatagagggggatatagtctgcgcagcatatgcacacaaactgccaaaatgtggtgtgaaggttggcctgacaaattatgctgcaacttattgtactggcctgctgctggcccgcaggcttcccaataggtttggcatggacaagatctatgaaggccaagtggaggagactggcaatgaatacaatgtggaaagcattgatggtcagccaggtgcctttacctgctatttggatacaggtcttgccagaactaccactggcaataaagtttttggcaccctgaagggagctgtggatggaggcttgtctgtccctcacagtaccaaacgattccctagttatgattctgaaagcaaggaatttaatgcagaagtacaccagaagcacatcatgggccagaatgttgcagattacatgcactacttaacagaagaagatgaagatgcttacaagaaccagttctctcaatgcataaagaagagcgtaactccagacatgatggaagagatgtataagaaagctcatgctgctatatgagagaatccagtctatgaaaagaggcccaagaaagaagttaaaaagaataggtggaactgtcccaaaatgtcccttgctcagaagaaacatcaggtagcttaaaagaaggcaagctccctcagagctcaggagcaggctgctgagagctaaaccaaacaattttctataaagatttttcagataaagacgataaacatatggacagaaaaaaaaaagatttaacctctttgagtctcagtattcccacctctaaatggggtcactaatatttctaacccaggcctcttataaggatcaagtgaaaaaatttatgtgcaaggaactgacccagggcctggcaaataatagtcacaagtttgaatccgaatcagtatgcaaagataagagcaatttttaaatattctgaacaattaaaaggataattaatgacaggcgcagtggctcacacctgtaatcccagcactctaagaggcggaggcaggcagattgcttgagcctaggagttcaagaccagcctgggcaacacggtgaaaccctgtctctacaaaaaatacaaaaattaggccgggcacagtggctcctgcctgtaatcccagcactttgggaggctgaggcgggtggatcacctgaggtcaggagttcgagaccagcctggccaacatggtgaaaccccgtctctactaaaaatacaaaaaaattagccaggtgtggtggcacactcctataatcccagctactcaggaggctgaggcaggagaatcgcttgaacctgggaggttgaggttgcagtgggccgagatcacgccattgcactccagcctgggcgacagagcaagactccatctcaaaaaaaaaaaaaattagctggacatgggggcatgggctggtagtcccagctaccgggggttctgaagcaggaggactgcatgagcccaggaggtcgaggctgcagtgaaccgtgatcatgctaccgcactccagcctgggtgacagagcaaaactctgtctctataaataaaaaattaaattaaaataaaagtataattagatgtaaggcattaactggaatgaaaacatgataaatgatttctatatcaaataaatgcaaattaaaccctttttttatttactaaattagcccaaattaaaaacaaattataatatccacagctgtcaagagcataaacacgctcaagtcaaaaacctaggtggctaggtcccaaagaattgaaaacagggactcaaatggacacttgtacacctctgttcatagcagtgttattcacaatagccaaaatatgaaaacaacccgagtgtccattaacaaatgaatgaattaaaaaacgtggcataggcttggtgcggtggctcacgcctgtaatcccaacactttgggaggccgaggtgggtggatcacaaggtcaggagatcgaggccatccgggccaacatggtgaaaccccgtctctactaagaatacaaaaaattagctgggtgtggtggtgtgcacctgtagtcccaactactcaggaggctgaggcaggagagtcgcttgaacccgggaggcgtaggttgcagtgagccaagatcgtgccactgcactccagcctgggtgacagagcgaaattcagtctcaaaaaaaaaaaaaagtgcaatatacatgcaatggaatattactcagccttaaaaagaaagtctacattcaacaacacagatgaaccttaagaacatcacaataagtgaagtaagtcagccacaaaaggataaatacagtatgatttcacttatgtggttcccagaataagcaaactcatacagacagtagaatagtggttaccagggaggagtggaagcaagcaatagggaactattgttttgaagggtatggattttctgttcaggatgatctggaaatagtggcgatggttaaacaacattgtgaatgtacttaatgttatttaattgcacacttaaaaattgttaaaatggcaaattttatgttatgtatattttaccacaataaacaaacagaaaccctggatgtcatccttgattcctaactcgagtcaaatccaatccatcaccaagtcttagtgattctgcgacaatgtcttataccgtatttgcctcttttctttattctcagcttcctcaccagaggccaagccactatcatctcaactcagccatcacaacagtccattccacacacgacagcaacacagcctccaaagctctgcttattgtgcttcctgccctacctctctgatctgaccatatcatacggtagtgtcccctctaccataagctggtctctttcaggtcctcaaactaagccaagttctttcaggcttcaaggtttttcacatctcacatactgtttcctcttcctggtctacttttcctcagtgtctggatccctgccatctatcagtcttacatgtcacccctttaggtcttccctgaccaccctatcaaaagtgggtttctggccaggtacggtggctcatacctgtaatcccagcactttgggaggccgaggcaggtggatcagttggggtcaggagttcgagaccagcctggccaacatggtgaaaccccgtctctactaaaaatactaaaattagctgggtgtggtaatcccagctactcgggaggctgaggaaggagaatcacttgaacccaggaggcggagattgcagtgagccaagatcgcaccactgcactccagcctgtgtgatagagtgagactctgtctcaaaaaaaaaaaaaaaaaaaaaaaaaaagtgggtctccttcctcactgttattctccttaacagcaaacaatctgcctccatcagtgtgcacttaccacatttggcatgtgtttactcatttgtcatctgcctcccatgattaccagcatcgggatggcagggacattgtgtcatttaacactatttacccaagtgccaggcataaggctggcacacagtaggcattttaaaatgcttgttggccagacacgatggctcacacctataatcccagcactttgggaggccaaagcggaaggactgcttgaggctaggagttcaagatcagccttggtaacatagcgaggcctcgtctctataaaattaagaaaaaaaagtttgttgaataaataaatagtgttcagtcctttaaaaacattccactgtgattttggttggggttgcaggctaaggggaggttatgaagcatcttcaaagctaggaaaaacataagttaaaaaaaaagaaaagaaaaagaaaaagaacagtgaattcctggcagacagtgagcaaagcagtaacatgaagtaaatggtgacagggttggattgggggaagatcctgtaatttggaaggctatgatttctcccccttaactagtcagaaaacaaacaatggcaagtgaagtaaattgacgctgaaagtcaacatttgctattataaaataagaacttcttgaagacaaccgtgaatccatcctgctctttcagtagcatttctcttctttcctctcttaccttggtgtcttggggttggagtataaatacttgcaacctcttcggagtcgttaatctctagacgctcatcatatgtctggttttcaacaaccttggtctaagcaaagggagacataattcatagctcctatcatgagacataaagcactctgccaggaggtatattccaaaccagcattggctcctcttccttactcaagaaaccagtttttcacaaaaccatcaccccatccaaactttccttcaggcttcctggccctcggtcaagcagttaagtcattctgttgcagcccttatttaggaactgctggcaggctggctgaggaaccagggaatcgtggagggaaagagagccaacttctgcagcttcccaaagctgtacgaccacgcgcaagggcagaacactatttgtatgtagatggccaaggctgttgaggtttctcagggaaggctgtagaggttctagaaagagttctgtctctggagtcacctctggggtggggtggggtggggtggggtggggtggggtggggtgggctgaggcggggtagggtgggagggtccccgaagagaggggaaactccagtctctcagtcccatccgataatcccaaaatcatcacctccactttcacccttatcttgcagataggatcccacctaagtttcttgggggaataaaggaagcaggacggttggtggtgaggtgacgaaggaacagttaccacggagattggaagaggtaaccgggaatggggtaaaggggagtcctcttaagcctctctagaaagacagttccctttttgctgggatgagtactaattacctgtagcccttctgaatccgtctcctctataatggaaagaaccccagcctagggctggggtctcactccagtctcaaagccaggccactttaggattccacgccaagcaaccagcctgttgtcagtcgctaggcaaaaagataaattttaaaattcgcgagagttgcttccactctcgtgagacctcctgcgcgttaagcctcacccgcgaaggctctccacgcaggaagaagatcaaggagtcacggataaagcctctctgggcggccaagtcgcctgtttgtctatggtttcagtaaatacgtctgttgcggcatctagcggctatgggtggcaacgcggctgataaatttcgggctggtgtagagttagcccttcaatctggaaacaaggtgtgcgtttgttcccctaggacaacaatctctggggatgcagttgctcccagatcagtcttaccaggatgtagacacattccaggggaaatttcgcagcactctgtaagtccttttctagcactatattacactatagtctttcccctccacagggtgccatggaatggaacatacttatagcaataaattattccttgggtatctgaggttcaaatttaactctgtgggccgggcgcggtggctcacgcctgtaatcccagcactttgggaggccaaggcgggcggatcacgaggtcaggagatcgagaccatcctggctaacacggtgaaaccccgtctctactaaaaaattcaaaaaattagccgggcgtggtggcggacgcctgtagtcccagctactcgagaggctgaggcaggagaatggcatgaacccaggaggcggagcttgcagggagccgagatcgcaccactgcactccagcctgggcaacaaagcgagactccgtctcaaaaaaaattttttttcactctgtgtcctgtctttcttatttgctaaagtagacttttaacttatttaaagcaagacctgtgtctaattaatttttaagctttgtaacaccagtgtattgcagaaattagacactaacaatgctcattgggtggatgaatcgaggaatgagtgaatggagatgtaaggaacaaatattttcaaactgtggacataattaatttgggaagtcagggagagagaaacataaaatattggaggccaggtgcggtggctcacacctgtaatcccagcacttcaggaggtagaggtgggacgattgcttgagttcaggagtttgagaccagctagagcaacatagcaagaaccgcccccctccactctattaaaaataaaaaaaaaattttttttaattagccaggtgtggtggcacgcacctatagtgctagccactcgggaggctgaggcggggggattgcttgagccagggaggcagaggttgcagtgaaccgagattgggccactgcattcactccagcctgggcaacagatcaagaccccatctcaaatataaataatgaataataacaataataattttttggtcgggcacggtggctcacgcctgtaatcccagcactttgggaggccaaggtgggtggatcacaaggtcaggagttcaagaccagcctgaccaacatggtgaaacccccgtctctactaaaaatacaaaaattagctaggcatggtggcgcgcgcctgtaatcccagccactcaggaggctgcggcaggagaattgcttgaacccgggaggtggaggttgtggtgagccgagatcgcaccactgcactccagcctgggcgacagggcgagactccgtctcaaaataataataatagcaatacattttaaaaagaaaataatattggaaatttgaccctgaaaacctaccagaggtaaacaaggaaagtgcctttaaaaaatgagagacagcttttctggcatactgatagttaaaaatagaactgcatttaaaaaaaaatttgtgatctgttttgctcgtaatagtggatatgtaatgtgcagtacttactatgtaggagcacttagtttttttgtggggagcacttagattatatcatctaatttacttcacaaccttatgagatagatgttactgccaatctacagattaagtaattgaggcttagacagttaaagtaacttgcctaaagtcactcataataagcgctgaaaatagcagccaaacacaggtcagtctgattcctaagtctctgcttttaaccattataagatactgccactatgggactcctcaagaagcatgcttacagggttgctttttcttctgtggtttaattcagctaccgttatatttccgaagaagcagcatcaactggtctttgctgagcttctgagatccaagttggaagccctggaaggtgctacaataaggcaatagtttctaacaggatttttacttttctaaaaaaataagaatttgttccatgtttcttaaaatatgtctgctttttgtaacaaaaattaaaattgggccaggtgaagtggctcacgcctgtaatcctaggactttgggaggccgaggcaggtggatcaccagaggtcaagagttcaagaccagcctgtcccaacatggtgaaacccccatctctactaaaaatacaaaaattagccaggtgtggtggtgcatgcctgtaatcctagctactcaggaggctgagacaggagaatcgcttgaacccgggaggcggaggttgcagtgagttaagatggcaccactgcattctagcctgggcgacagagtgagactgtctcaaaataaataaataaataataaataaataaataaaaagttaccccataaatgtgtacagttgttatcttttttaggacatttcatcatcccctaaagaaagtttgtacccattgtcactttttttttctttttttgagacagggtctcactctgtcgcccaggctggaatacagtgacgagacctcagctcactgctatctctgcctcggggttcaagcgattctcccaccgagtagctgggactataggcatgggccaccacgcccagctaatttttgtatttttagtagagatggggtttcaccatgttgctcaggctggtctggaattcctgacctcaagtgatccgcccacctcggcctcccaaaatgctgggattacaggcgtaagccaccgcacctggccagtgggtacaagtattatgtgtcaattagaaaatttaaaaataggccgggagctgtggctcacgcctgtaatcccagcactctgggaggctgaggcaggcagatcacttgaggttaggagttcaagaccagcctggccatggtgaaaccccatctctactaaaaatacaaaaaactagccaggcgtggtcgtccatgcctgtaatcccagctacttgggaggctaagtcaggagaatccctccaacccaggaggcagaggttgcagtgagctgagatcataccattgcactccagcccgggcaacaaaagcgaaactccttctcaaaaaaaaaaaatttttttttttaaaatattgactgggctcagtggctcattcctgcaatcccagaactttggggggacaagatgggagtactgcttgaggtcaggagttcgagaccagcctgggcaacatagcaagacccccatctctctaaaaaagtttttttaatgaaaaaaaactttaaaatacagtttgacatatatcctcccagacatataaaatttaaaaatatttgagctttctaaagatttctattagaaggccattggagatggaattgatacgggtaagagcaagaagtctataatgcagtgcttaagggtatagtccaaagttgaacagcctttgtttgaatcctcgcttacctactttttagccatgagacctgtggtgggatagttttcttctctgtaccttgatttcctcatgtgtaaaatggagacaataaaggtacctatctcagaggattcttgtgaggattaaatgagataatctgtgtgaagttagagtaatggctggtatgctgtaagtgttcaataaatgttagggaacacacaggagatacagaggcagtgtgttttaatggaaaaagctgactttgtttttttgtttgtttgttttgagactgagtgttactctgttgcccagtctggagggcagtgttgtgatctcaactcactgcaacctccgcctcccaggttcaaccaattctcatgcctcagcttcccagatagctgggagtacaggcatgagacaccacgcccagctttttttttttttttttttttttgagacggagtctccctctgtcgccacgctggagtgcagtggcatgatctcggctcactgcaacccaacctccgcctcctagcttcaaggattcccccacctcagcctcccgaacagctgagactacaggcacgcgccaccatgcccagctaatttttttttttttgtactcttagtagagatggggtttcaccatgttggccaggatggtctcgatctcttgaccttgtgatccgcccacctcagcctcccaaagtgctgggattacaggcgtgagccaccgcgcccagccaggagaaaactgactttgaacttggctctaccacttactagttgtgtgagtttggacaaatgcttaacttttttgatcctcagtatctttatttggattgatgtaaaagattggaaataacatgtgtaaagtacctgacacaaatgaagcactcaattaaaagttgctattatacttaattgtggacatacaggtttaatatggatgagtgctgttcggttgagctaaggatgtaggataaaatgatttaaggaagaactactgaatcagctatactctgaaaaatctgaaatttggcatacaagaaataacatgagaatcacaagaacagattttgagtcttggttccatcatatactggtttagaaactttgggtaagtcacttaaacttttcaccattttcttcatatacaaaatggacatgagcacaactgccctgcttccagtgcatgtttttttaaagatataatttacaaatcataaaaattcaccttttaaaattatacaatttagtggtttttagtatatttgcctctatctagttccagaactattttttttttaagagtctaagtctcacaatttgcacaggctgacctttaacccctggtctcaagccatcctcccaactcagcctcccaagtagctgggactctaggatcatgccaccatgcctggcttaattccagaatgttttaattattccagaaataaatcttacactaattaactgtcactctctattcctacccttcctgagcccctggaaatcactaagctagtttctgtctctgtggattttcttctattctggatctttcgtattaatggaatcatatatgagtgccccattgtatccgtcttttttcacataatattctcaaggttcatccatattgtagcatgtcagtactttattcctttttgtgactaaataatattccattgcatatatatgccacatctattgatgaatggatttgtttggattgtctccactttttggctactatgaataatgctgctatgaacattagagtacacatttttgtgttgacatatattcagttctcctgggtatgtacctatgagtggaattgctcagtcatgtggtaattttgtttaactttttgaggaactgccaaactcttttccaacgtggctgcactattttacattcatcctcaccaacaattattatgatagccatcctagtgagtgtgaaatgacgtctcaccacgggtctgatttccatttccctaaggatattcaacatttcttaatgtgcatattagccatttatatatcttctttggacacatatctattcaaatcttttgctcattttaattttgtgttttctactccctccattttgcagatgaagcccatttttagacaggaatactgtatttgtctttttattgctgagttataagagttcttaggccaggcgcggtggctgacgcctgtaatcccaacattgggaggctgaggcgggcggatcacttggggtcagaagtttgaggctagcctggccgacatggtgaaaccccgtctcaactaaaaatacaaaaaacagccgagcgtggtgtggcgcgtgcctgtaatcccagctactccggaggctgaggcagaagaatcgcttgaacctgggaagtggaggttgcagtgagccgagatcacgccattgcactccagcctgggcgacagagtgagactccatctcaaaaaaaaaaaaaaaaagttctttatatattccggatactggtcttttaggcacacaggttatcctgtatattaaataatagtggctgtgccagcggcttgttaaactgtaagatgtgacgcaaaataaatgaaggcgatgacagtgaaaggggagagatacgaggttccacagctggagggtgaacgccccctacacctcctgggcttaatcgtaaccggagcggggtaccctcaatttccccagcccacaggccccgcccccccccccgccctttgacctgcgccgcttccggttgaagacgtggcttggggccgccatcttggcaagaggcgaagcggcagcggttcctgtcaagggggcagcaggtccagagctgctggtgctcccgttccccagaccctacccctatccccagtggagccggagtgcgggcgcgccccaccaccgccctcaccatggtaagatccgagccaggacccgaactcctggggtccgagcctcaccgtctctccttgtcggcgggcctggggcaggggccggaggagccccgccctgagggtctagggcagagtgcttttgctccgggctcggggagcagtgtggcctcctgtgcccggtctcctggagatccgatggagctgactccagtccatctgtcgtcgtgcccgcttccgcaccaccccccaaccagctggactccctcgtttgctgggacctgcccctgagacggcccggcgtttttgctctgcgagaacttcgtggtggtggtgcgggtcccaggctgcggacctcggaactgatgctgtcccgccggttccctggcgcttaggctcagcaggctgggcctgtctccggaggttctggtccttctgttaatcagagcttgtctcccacccccggtgtttgctaggccgttgataactcgaaatgcaaatccactggtgtccagaaatttttctttttgttcagaagggggaaatggagacacagagcggaaaggagtaacttctaacactaatgtataggacccaagtgtctctgaaaccttccactacttccgcagaactcacttgtgtccatttgttagtgtgactcggggtacatacactgtgtagaccactgggaaaatgtgagcaggttccagagaacacagggtttgccttcaaggaacttattgtccaggtgaagaaaaatgtgtatgtggcatgtcgtagtcagatgtctcacaggaggtggagtaagagggatgggttagcctccgagaccagttacttgccttcccatgcgttatctttgtatactcatctgttacaaggatgagaaaggttaatgtggttgaggatggaggaaatcagaactgctgacatcactcaatcttcctttatcgctgtgatttgtggatattcatgaagtagtagacattctttggtttcaaaaaagctagtaatttatttttcagtgcaccttatgtcctttagtcttttgaaggatgttctgttctgttcttttttattcttttgtcaatagataacttgatttaaaacatcgtccagtgtacctgagagatggcagaatgtaatttggtggcaatcctaataagttctattgacaaccctttagataagaacttggataatggggggaattcatgcttggactttaggccactgaacagcttttctcagcctcaggtatataaattgcatcaaacaggtttgcctcctaaaatttttgtgttggacacaaaatttccagaaacttgtattttcagtttctccaggaggttctgtatttggttagtgattttgaaactcagttcccgtttacaccctggaattaataatgcattttagagcatatttttattttaatagtaaagttaaggtcttgtattatataaaccagataaaggtaatctttctaaaaatattctttgttaaaaggttcttggaacttagtatttttaattcattgataactgagggatggtaaagccctacgtgatatatataaaatataacttttgcatgctattttgacatgtgtacgtatacatagagttgtgtcacatatttctgaattatttgggacttaacatgatccagatacccacagatttgtgtactctggagaacaatttatctcagtacattctgctctgtagagtgttaagacattggtatgatttctgtgtaatgtttttgggtcctgctcctttacaaacagatccctggacagtagaaatgtccagatagggtgaaatttttatctaaaagttgtatcaaaatttccagcgtttattttagctcaacatttcattatgaaattttccaacatctggaaaagttgaaagaactttgtagtgaatacccatataaccaccaactagattctataactaacatttcactatattttatcatgcatctaatcatccatccatccctctctccattaaaaaaaaatatacatttcaaagtaagttgcagatatcagtacgtaaacattgattttttaaaaaataaattccctttggctttagttattgaagtgcagaatgtcctagactgcaaagttccaatagataaataagtgaacaaatgcagaaacaaatgctttctcatgacttcatcataaaataaagtacaaagaaaggcatcttttgattttttttttttaaagagacagggtctcactatgttgcccaggctggagggcagtagctattcacaggcgctatcatagtgcactgcggcctagaactcctagcctcaagcaatcctcccgcctccatatcccaagtagctgggactgtaggcatgcgggccttgatttgatcttttttttgtattctgcaaattaatgagaacatgttctgactttttttcttgtttgtttggttttcgagacggattctcgctctgtctccaggctggagtgcagtggcacaatctcagctcactgcaacttctgcctcccgggttcaagctatcctcctgcctcagcctcctgagtagctgggactgcaggcgcctgccaccacgcccaactacttttttgtatttttagtagatacggggtttcaccatgttagccaggatagtctcgatctcctcacctcgtgatctgcccgcctcggcctcccaaagtgctgggattataggtgtgagccatggcgcccggcccctgtattatttatgtatctttttaattgtgttttgagggacagcaaagaaagaaaatgattctcttgagtttccattgatttgccatctatttatgtcttcatatagaagttcactgcagaaactgataacgggtgtgtgtgtgtgtgtgtgtgtgtgttttaattctctgcaagcttttgttttagaatagaaatgtgatggacttaaaaccctcactgagtaaattacttttcaagttttaggtttcgtatgtggtctacattttattgtaatcttctctctgattttatctataatagcttcatataaatagaaaagacagaacagtcctccctgacaattatagaaactagccttaatatgaccatgaattgtgtgtgcatgtatatgtgtataaaatattgcggtgaattacaaaggagaaggtgactataattctggaagtaagggatcctgaagcatttagagattcaagaaagaacttgactttttttgagagagagttgtgcatatttatcctgaattattataccacctgttattcttgtatctctcttgcacacacaatttgttatggttagacaatttgccttctggcagcctaatgttactataaaatattgttccaaagtggttagaactggagcagtgggtataaaatggaagtattgtacattttctgtcactgtagttgtttttttttttttctgttactgtagttttcaaatgcttagacttacagaactttaaagacacagagcactttggatttcatgtaaactaacctcctatgttagggatatttcaataatcaattaagtgacttatccaaggtcacataattagtggcaaaggcagaacagaaacctaattctccaggtttttttacttgaggcacttaacaattcatgtagttaagtctgtgtaggagagagttgttatttagtccaaagatagtgtactcaaaccatgtaagaattattaaaagttgtttggcaaagctcaactttatgagggaattttttttttttttaaccgtcctggagagatcatctaacttatgggccctcagttttcacatctgtaagacaatcaagggctcttgcaagttccttttagatctggaatgttttttccaaaaatgttaaaaaaaaaaaaaaaaaaaaaaaccaaaaactttgtaatcatatttattaattcttcctcagagaaaatcagatcaaatttcaatagggaaaattgttaacttaccttttagtatatgctatattttaataattgttaaaccagtaaacattaatgtaaagaggtttattatttcaagaactttaagaagacaaatgttaatttaggataggataaatttatcatgtttagaggtgaccataccttctagccatattagtagctgtaacagagagacctgtgtcaactgcctggaacctgtaatttgtggtgtcctgggtgttcggagatttatgctatacttagtatggggaactatggtcctattttggaagccttgttttgcttgtatctggataatggaatgactcaaagagagacatatgattttaccctacttctttcttcatcttgacgtactgaaagcctggaattctggccaggtgtggcggctcatgcctgtaatcccagcactttgggaggctcaggcgggcagatcacttgaggttgggagtttgagaccagcctgggcaacatggcaaaaccctgtctctacagaaaaatacaaaaaattagccaggtgtggtggcctgtgcctgtagtcccagatacttgggaggctgaggtgggagaatcacctgagcccagaaggttgaggctgcactgagccaagatcacgccactgcactacagcttgggcaatagagcaagactctgtttcaaaacaaacaaatcctggaattcatcaaagcatgatctaaattctgtttctttctttctttctttcttttttttttttgaggcagagtctcactttgtagcccaggctggagtgaagtggtatgatcttggcttactgcaacttccgcctcccaggttcaagcaatcctcccacctcactctccccgtagctgggactacagacgtgcaccaccagacttggctaattttttgtattttttggtagagacagggttttcccatgttgaccaggctggtctcgaactcctgacctcaggtgatctgcctgccctggctcccaaagtgctggattaaggcatgagccaccgctcccggcctaaatgctgtttcttctatcaagtcatccctgactgtaccagctggaagtaatctcttcctctgaatttccacgcactttatcggttactctctcatgttacttaacacattctgcctcatattacagttatttgtgtttgtgtcttatccctattaagcttcttgtaggcagaatgctagcctgtgtcatcttaattctcagaaagcatgttgtatgtatagtagatgttcgataaataattactcagttaattcttataatatcgcaaaaatggagattaccagtacctataattagtttttgaacatgctcatcagtaaagtggatgggccaggtgcagtggctcactcctgtaatcccaacactttggaggccaaggcgcgcagatgacttgaggccaggagttggagaccagcctgcccaacatggcaaaaccctgtctctattaaaaatagaaaaattagccaggcttggtggtgctggcctgtgcctgtagtcccagttactcaggaggctgaggcatgagaattgcttgaactcaggaggcagagcttgcagtgagccaagatggcaccactgcactccagcctggactacagagtgagacactctctcaaaaaataaataaataaataaataaataaataaataaataaataaataaataaagtggatagtaacatacacctttttgttcctttttccctctcaagttgcttttgatgtttttacctaaattttacttgtatggtatagaggtgtttttaactccagttggaaacctaagaactacccttgagcctgtaaacattgtttctaacaggtttattattagatatggggtttctattaaatgcagcatgtttatataggtctgaagttttggtctgagctgtcctttctttaggtgttcatttgatttgtcttatttcttcaaaacctcataaaattctaacatagaggaccatgacttcctagagctatgactctcaaccttttagggataggaggctctacagggattacatttacaatatgctcccatttattaataatatttctcatcgcatgaggggattttctatgggccatttgaaataacttctctagaggatcgatgcattccctgaaactgtatgtaaaattttggggggagagtcaatattcattatttgaatatcaaaatattgacaaaggcaaaaatccattgccttggccggatgctgtggctcacacttgtaatcccagcactttgggaggctgaggtgtgcggatcactttagcccaggaatttgtagcctgggcaacatggcaaaaccccgtctctcttttttttttttttttttttttttttttttttaataaaaaaagaaaaatccattaccttgaagtggcataaatttttttcatgagatgcatgtttattattactaatggtgctgttttacatcatgaatatatgtgctacaagttgtatagcacttctgaagtacagtttcattatagtcatttggccctcataatagcttgtaaggtcattagataatgctgcattttataggaaaagaaacgaggttaagagaggttgggtaactgaaggtcaggcagatagtaaatagaagaacaaaactagaaaatagattttctcactcccagtcatttagtttttctaatatcagcttggttctttgcaaatttgggacactagttctaagtctttaggaaaaggagaaaccaatgtgaaatgatcccaaatataagggaattccctacttttctgatgaaactattaagaaggaaagctttttgccaattgtataaactttttaaaatgcagccaaaataggccgggcggtggctcatgcctgtaatctcagcactttgggaggccgaggtgggcagatcacccgaggtcaggcatttgagaccagcctggccaaccaacatggtgaaaccccatctctactagaaatacaaaaaaaaaaaaaaaaattagccgggcgtggtggcaggcgcctgtaatcccagctactcgggaggctgagacaggagaatcacttgaacctgggaggtggaggtttcagtgagcggagatcttgccattgcactccagcctgggcaacaagagcaaaactccatcttaaaaaaaaaaaaggtagcaaaaatagtcaaatatgttcttaaaatagttaataattcacttatatgtatatgttttaaataaataaagtttaatttagaaataattacttttttccattttcatattaataaaacaattttttctagattctttatgaacatcatgtcatcactggggccactttttgaatcatcagtttggtatttagcagttttgaatccatgtgtgatatattggcagtttgggaaattttatcccaagtcataaaaacccatttatataatattaggatagttgcttttaaaaggaatattttgtaactgatattcaacacatgaaattgtgagttctggctaggcgtggtgactcatgcttgtaatcccagcactttgggaggccaaggtgggctgatcacttgagtccagaagttcaagaccagcctgggcaacatggtgaaaccccacttctaccgaaaatacaaaaatttgccaggcatgatggcacctgcctatagtcccagctcctttcagggggctgaggcaggaggattgttcaagcccagaagttgaggctacggtgagccaagattgcaccattacagtccagcttaggtgacaaagtgagaccctgtctccaaaaaaaaagaaagaaattgtgaattctgatcctcaggataattactaaatccagtgaccttttgttagtactacatgcaaaactagcgtagtttgaagataagatgtatcccagacaattattttagttcaatataaagtcattgagggagcacctttaatatgagagactatggaaggattcaaaactacacaactcttttttaaaaatatataagtattccttacataaaaatatattaccatgatagcatattttcacacctaaaaaattagcaataatttttaatattatcaattattcagtcactgttcaaatttgatttatacattgtgattgattgacatgtctaagtctcttaatgtgtttgtatttttagtagagatggggtttcaccatgttggtcaggctggtctcgaactcctgacctcaagtaatccactcgctttggcctcccaaagtgctgagtttacaggtgtgagccactgtgcccgtgaaagtcagtattctattacttgtcatgtcagctggtcgtggtagttcacgcctataatcccagcactttgggaggccaaggcaggaggatcgcttgaacccaggagttcaagaccagcctgggaaacatagcgagatactgtctctactaaaagctttttaaaaattagcgaggcttggtggcacacacttgtagtcccagccactcaggatttcttgagcccaggagtttgaggttgtagtgagctgtggtcttgccattgcactccggcatgggtgacagagtgagaccctgtcttaaaaataatactactactagtcatgtcactaaataaatatgtcattctatggaacatttcctgagatgctgagaaaacagatgtgaagaaataattagtacttacttatgcatatgttcctggcaggtgctgttggcagcagcggtctgcacaaaagcaggaaaggctattgtttctcgacagtttgtggaaatgacccgaactcggattgagggcttattagcagcttttccaaagctcatgaacactggaaaacaacatacgtttgttgaaacagagagtgtaagatatgtctaccagcctatggagaaactgtatatggtactgatcactaccaaaaacagcaacattttagaagatttggagaccctaaggctcttctcaagagtggtaagagtactgctataatactgggttccactttttgttttacattttatgtgaaactagtttttcctccaaagcagctgatgctaaccagtttgcaggttcctactccgcaccccagcgacttattgctgcagcaccttgtttattcagcagacatttattgggtgtcctcttagactatagatgtctcaaaagaatatgggaactactgtttcatttcccagttcttaagcagttgttctaatctgccgttctagttctgacacttgtttggctatgctttttaggtaatgttttttaggtaagacttactgatccagagacagacacacacacacacacccctcttctaagactttatgccaaagtcttgcttaaaatgaagacttaggtaagacttactgatccagagacagacagacagacagacacacacacacacacacacacacacacaccttttaagactttatgccaaagtcttgcttaaaatgaaggctaaggccaggtgcggtagcatgtgcctgtagtccaagctactcaggaggctgaggcagaaggattgcttgaggccaggagttcaagtgcacaggcattatactttagtgtgggcaacacagcaagaccctgattcttttttttttaaagacggagtctcgctcttgccctggctggagtgcagtggtgcaatggtgcaatctcggctcactgcaacctccacctcccaggttcaagcaattttctggcctcagcctcccgagtagttgagattacagatgtgcatcgccatgcctggctaatttttgtacggggtttcaccatgttggccaggctggtctcgaactcctgacctcaggtgatctgcctatcttggcgtcccgaagtgctgggattacaggcatgagccgctgcacccggctgtaagaatcagggtcttgggcgtggtggctcacgcttgtaatcccagcactttgggaggctgaggcgggtggatcacctgaggtcagaagtttgagaccagcctgaccaacgtggtgaaacctcgtctctactcaaaatacaaaaaaattagctgggcatggtggcgggcacccataatcctactactcaggaggctgaggcatgagaattgcgtgaacccaggaggtgggggttgcagtgagccgagatcgtgccactgcactccagaccgggtgacagagttagactttgtcttaaaaaaaaaaaaaaaaaaaaaatcagggagttaggctgggcgcagtggctcacgcctgtaatcccagcagtttgggagactgaggcaagcggatcacctgaggtcaggagttcaacaccagcctggccaacatggtgaaaccccgtctctactaaaaatacaaaaattagctgggcgtggtggtacacacctgtagtcccagctactccggaagctgaggcaggagaatcacttaaacccaggagatggaggttgcagtgagccgagatggcaccactgcactccagcgtgggcagcagagcgagactctgtcccaaaaaataaaataaagactagaagtagctaataaagggatttaggttattgaaatttatgtactctaaaggataagacttggaaatatagctgctgataaattctaaatctttcttttttattggtgtccacgcttagatccctgaatattgccgagccttagaagagaatgaaatatctgagcactgttttgatttgatttttgcttttgatgaaattgtcgcactgggataccgggagaatgttaacttggcacagatcagaaccttcacagaaatggattctcatgaggagaaggtgttcagagccgtcagagaggtaaataggatcttctctgggactacctgtttgtatgtctttctcttaggcttcactaatctcattttcctatttttacttactaatgtagactgtattcaaaactatgtccaggctaggcacagtggctcatgtctgtaatctcagcactttgggaggcggaagtgggagtatcacttgagtccaggagttcaagaccagactggacagcgtagtgagaccctgtctctataaaaagtaaaaaaaaaattagccaggcatggtagcacgtgcatgtgggtcccagctacttgggaggctgagatgggaggatcacttgagcccaggaagttgaggctgcagtgagctgtgattgtgccacttgcactccagcctgggtcacagagtgagaccctgtctcaacaaaaacccaaaaaaaaaagctacattaatgtatgtctttttctgtagactcaagaacgtgaagctaaggctgagatgcgtcgtaaagcaaaggaattacaacaggcccgaagagatgcagagagacagggcaaaaaagcaccaggatttggcggatttggcagctctgcagtatctggaggcagcacagctgccatgatcacagagaccatcattgaaactgataaaccaaaagtggcacctgcaccagccaggtataatccagtgtactttagaataccaggtgaagggtgtatatgtgtctatctttgaagtcataatctgatttcttggaaagctgtaaataaagaaggacttgatgaagtaagatatgatgttacatttggccacatacaatatgaggataaagaagaaatctgaatgtggtgtttttccttttgtataaaagagagttataaattatgtcatgacctcagtttcctatgagagttgccttattgtggggaggaaagggctatttaatgctttatggaatgtagatttttaatcttgatgttcattgattgattttaggggaaatctgtgaattacccaaaattatatacaaaattttgtgcacaggtgtatttctctggacgggagatacaaaattttcatcagatcatgtgtgcttgtaaaaataaacctttgggtaatgaatttcaaattcttccacttaggccttcaggccccagcaaggctttaaaacttggagccaaaggaaaggaagtagataactttgtggacaaattaaaatctgaaggtgaaaccatcatgtcctctagtatgggcaagcgtacttctgaagcaaccaaaatgcatgctccacccattaatatggaaaggtaagtaggaactttgagtaagaattcaagctttgaatacagtccacataattttttaaaaatcttatttcagtgtgctataaattctttctctgtcttttaatcgttcctgatttaaaagatttattcagagcagattctacatattaacataagatcgtttttggttttgttttgttttatttacttatttttttttgagatggagtctcactctgtcacccaggctggagtgcagtggtgtgatctcggctcgctgcaagctctccctcccaggttcacgccattctcctgcctcagcctcccgagtagctgggaccacaggcgcccacccctacgcccggctaatttttttgtatttttagtagagatggggtttcgccgtgttagccagaatggtctcgatctcctgaccttgtgatccgcctgactcagcctcccgaagtgctgggattacaggcgtgagccaccacgcccggctgttgttttgttttatttttttgagacagggtcttactatgttgtctaggctggcctccaactcctgagctcagttaatcttcctgcctcagcctcccaagtaactgggatacaggcatgcgttgctgcacctgaccttttcctttttccttaaaccatgattgggggccctcagccacctattttctatgaagtttagaactttccttttacagctaaattaaagttacttgtagtcacacctggtatatagcgtatctcttagaatgcacttgaattaggggactagagctatggtgaccccacactgtattttggcatgactttttctaattaaagtctaagtagaaccaatctttaatccaaaacttgtagatatctttaatagcaaattaatatattttgcatttttattttatttatttatttttttgagatggggtttcactctgtcacccaggctggagtacagtggtgcaatctcagcttgttgcaacctctgcctcccaggttcaagtgattctcccacctcagcctcccaagtagctgggactacaggcatgcaccaccacgctgggctaatttctgtattttggtagagatggggttttgccttgttgcccaggctggtctcgaactcctggactcaagcaatctgcctgcctcggcctcacaaagtactgggattacaggcgtcagccaccatgcccagccatcttttgcagtttaaatatttgaagccagtatggaatattttgattcatctcttatctcagggctgtggtactggttggtgacatttttaagtggtagttatcaagttcacatattcgtgactcagatttctcgtcttgaagccagaccttctactgttgctgatggttttgaggtcaagtgaaagataataccaggaggatacctttatcaggtgtgcataaaagaggagtatttactctttttctttcttctttcctttctttcttcctttctttctttcttgacagagtcttgctctgtctcccagactggagtgcaatggcacgatcttgcaacctccacctcccggggtcaagcaattctcctgcctcagcctcccaagtggctgggattacaggtgcacgccatcacacccggctaattttcttatttttagtagagacagagttttgccgtgttggccaggtgggtctcgaactcctgacctcaagtgatctgcctgcctctgcctcccaaaagtgcttggattataggcgtgagccaccgtgcccagccaagtatttactctttatatgccctgttctgtatgaaatgaacagggttacattgggataaatttcttgattcactaaagccgctgtgctcttcctagtggttgctttgagtgagacagaggcttcacacttttaaaaagatattcctgagtgcagtggcccacacctgtaatcttagcactttgggaggctgaggtgggcggattgcctgagctcaggagttcaagaccaccctgggcaacatggtgaaactccatctccactaaaatacaaaaaattaaccccttctccactaaaatacaaaaaattagatgggcgtggtggcacacacctgtagtcccagctactcaggaggctgaggcaggagaattgcttgaacccgggaagcagaggttgcagtgagccaagatggtgccactgcactccagcctgggcgacagagtgagactctatctccaaaaaaaaaaaaaaaaaaaaaatgttggagatcatcacatattaaagagaatttgagacactgtttttttctaaatgataaattgcctcttgagcacagagcaaacttttgtgaaggtaaaatggtaccatgcattgtcttaagatgcactcctttatggtcttgactctgatgcctttgtttctaggaagacctaagaggttggaacaaagaacatggtaggataacaaaatattttttgtagcctctgtagttcatccagccaaacgtatgtctattactgaatatgaatagattgtacttaatacttgcctctagcagcagcagtttttaatcttttaaaaattggattatacattcatatagtacaaaattcaaaagttgttaacagtcagaagtcttcctctcactcagccatgccagtttctcattttggagacaactagtattaacagagttttttgtgtatccttctaagggggatggtctgtgatatacagatgaataaaaaacatgtatacagtgtgtctatttttcccccttttatgcaaagcagtaaaactagacacgtcttccaattgcatttttcatttaattattttggagataagaatctccttatttgaaactgcagagatatgacatctaaatgcgcaataccttaccctagactggatcctctactaatgtagtgtagaaaaaacaactcaaactgtttgttttttctattttctcattcaacagcaacaatgaacacagaagacttctgtgatcaagtgtgtttagatttttccgcacacatcaagcggtcacacctagctggtgtcctccaattcaattcaattctgatgctatctacctgggaatagcctcagattctacaggttgagagttcagtcccccaagactgattcttccttcccaccagtcataagtccagactttcagaacttcttactgacctcaagtttggcctcccacgaccccctctggggtgttcaattaatctgctagagcacctcacagaactcagggaaacttacttgacatttatcagtttgttacagaggacattttaaaggatgcaaataagcagccagatgaagagatacatagggcaaggtctgggagggtcttgagcacaggagcttctgtccccagggagctggggtacgccaccctcctggaaaatagatgagaccttgttcatcttcctgtaagcctgcatgtgttcagctgtccagaagcttcccagaccctgtcctcttgagccttttatggagacttcattggataggcatgattgacaggcatgcagaaatgtgactgggcaagggtatgacctaatactgataggctgagtggggaaacacagcaaggcctgtccaaattcttggcctctctgtgcagcattaatcttcctccaggatatggtgcaggaccccttttggagatcctgccttgggctggtgaaaggagggcaggagaaggtcaaagagaggttcttttttctaagggctgctcctgaggcctaaagtgccccaacattatgtataataagggatatgggagttatgagctaggaaccatggatgaaaaccggtatgtatgtatatcataatatcacaactactattaaaaatattattaggtcaactgacgaaattgacatatggttgacagatcggatacaattattgtatcattgttagcctggcatgatggcacatggctgtagtccttcctactcaggaggctgaggcaggaggatcacttgagaccaggagttcaaggttatagtgaactgtgattgtgtctctgaatagccactgcactccagcctgggcaacatagcaagatctgtctcttaaacaacaacaacaggctgggtgcggtggctcacgcctgtaatcccaacacttcgggaggccgaggcaggcagatcacctgaggtcaggagttcaagaccagcctggccagcatggtaaaactctgactctagtaaaaatacaaaaatgaaccgggcgtggtggcaggtgcctgaaatcccagctacgcaggaggctgagacaggagaatcacttgaacccgggaggcagaggttgcagtgagccgagatcacgccattgcactccagcctgggcaagaagagtgaaactctatctcaaaacaacaacaacaaaaagctaaaaaaactatcagtgtaaatttgtgaagttaataatggtactgtgattgattatgtaagagaatatccctaatcttataaaataagcactgaagtatttaggggtaaagtgccgtgttgtatataatctgcttcttaatggttcagggaaaaaaaatcaaatgtataacatacatatataatgtttagagagagagaaacacaagtgcaaattataaaacaaatgaggtaaatattaacaataggtgaatctggaaaagggtatatatgtcttccttgtataattttaatttttttaagcttgaaaatacttacaaatagaaagttttttcagttgtttgttttctcaccattgcctactattcattcgggtggatatgcctttattttttattttttatttttttgagacagagtctcactctgttgcccaggctggagtgcagtggcaccatctcggctcactgcaagctccgcctcctgagttcacgtcattctcccacctcagcctcctgagtaggcgcccgtcaccacacccggctaattttgtttttgtatttttagtagaggtggggtttcaccatgttagccaggatggtctcgatcttctgacctcgtgatctacccgccttggcctcccaaagtgctgggattacaggcgtgagccaccacgcccgtgaatatgcctttatttgagcagccccctattggcagacatgtttctaaacttttgccattacaaacaattcttcagtgaataacttagcagattgttttgcacaggtgagaatttatctgtaggatagagtctgttgaagaattgctgtatcaaagggtatcgccttttaaatgttgatagctatagcagtagcacctttaaaaaaacgttgttgatggctaatcattagaccttggagaaagggagttctgatttctacctttcttttttcttttcttttcttttttattttttgagacagagtttcactcttgttgcccaggctggagtgcagtgggacaatctcggctcaccacagcctctgcctcgtggttcaagcgattctcctgccttagcctcccaagtagctgggactacaggcatgcaccaccacgcctggctaattttgtatttttagtagagacggggtttctccatgttggtcaggctggtctcgaactccccacctcaggtgatctgcccgccttggcctcccaaagtgctggggttataggcatgagccaccacgcccggccattggtttctacctttctgaacaaatgtattactttctctttatagtgtacatatgaagattgaagaaaagataacattaacctgtggacgagacggaggattacagaatatggagttgcatggcatgatcatgcttaggatctcagatgacaagtatggccgaattcgtcttcatgtggaaaatgaagataagaaaggggtgcagctacaggtgtgtagaagcttttgatagggagtattaacactttgtctacctattatagtctttctcaactagagttcccaatatgaaccacagaaaattacttaagttatataactagcatcactctaaacgcttaggaaagaagttaatatattgcatacagtagctacctgagagtgagtaaagcagctgtgtaaggatggcttttaaatattggaattgaataaaaggtcatttcgaaatctaataaatgacttcatactcaccaataaaaggtacaaggaggtgtttgtcttttgctgttatgaaaacagtaaattaatcacttaggatcttgcttgaaatacagttttaaaaaaacaaggctttaggccaagtgtggtggctcatgcctataataccagcactctgagaggctgaggctgaaggatcgcttgagcccaggagttcaagaacagcctgagcaatgagggctgagcaacaagaccctatctctacaaaaacttaaaaaattagccaggcgtggtggcacaatgcgaaatttactcattctgctattaaataaactgccagtgcttgttttgttaactgaagggcagtatctaatggtgtatttgaaaagtacataaaatcctttcaatataagtgtgtgtgttccaactattggatagatatatataagccctgctttatgttacaggtgttcttgtaatttcatttcatttagccgacatctcgtcacaagaacaaagcctttttacggaagagtgtttttgtctactttccccaccgtagtcagcacagaattgtcttttggaagcagtgcttatattatttgacatttttgctggcttgtaaagtgctatccaaaagtgatttctgttttgttttgttttgttttgttttcctgagatggagtctctctctgttgcccaagctggagttctgtggtacgatcttggttcactgcaacttctgcctccccagttgaagcagttctcctgcctcagcctgctgagtagctgggattacaggcacctgccaccatgcccagctaattttttttatttttagtaaagatggggtttcaccatgttggccaagctggtctcgaactcttgacctcatgattcgcccacctcatcatcccaaagtgttgggattgtagtcatgagccaccatgcccagcccttctgggttttttttgtttttgtcttgtttttttgttcttttttttgtttttttttttgtttttgcacagtctctctctgtcatgcgggctggagtgcagcagcacaaccttggctcgctgcagccttaacctcctaggctcaagcaatgcttcctcttcagcctccatagtagctggaactataggtgtgcaccaccacacccagctatttatttatttatttatttatttattttttattttttgagacggagtttcactcttcctgcccaggttggagtgcaatggtgtgatctcggctcaccgcaacctctgcctcccgggttcaagccattctcctgcctcagcctctcgagtaggtgggattacaggcgtgcgccaccatgtccagccccagctaacttttgtatttttaatagagatagggttttgccatgttggccaggctgatgtcaaactcctgaccttcaatgcccctctcacctcagcctccccaaaagcaatttcttttaaaaagataagactatcttaattggcttggattttaacaactttaagtctctaggcaaaattgcaactagactttacacagagcttgcccttttctgctactttatataaggccagaactgctgtctgacccaggcagctgatcagggtcttactggagccttctgcttggcaaacctggccccaccatgaacctgctccctgtgaagtatttttggaaagaacttggttaatagtcttttaactttttcaggtgcaaacttgttctgtaatggcttttagagttgaaattagctttttttttaaaaaattactagtttttaagtatcttaaatcattttaaaataagtctttgaagaagggaaatctttcttcaaaatgaaaaagaattggaatttgttaggtactctattttggatgtttagattgtgggccatataagcctagtgaggggttgtttctcgtctatctgaacctcaggagttttcctttccctctcattctagacccatccaaatgtggataaaaaacttttcactgcagagtctctaattggcctgaagaatccagagaagtcatttccagtcaacagtgacgtaggggtgctaaagtggagactacaaaccacagaggaatcttttattccactgacaagtaagtgcctctggccagtcccactaagctagtttgcattgagaactagaaatagcccttgctggtacacttttatttttattaccatagcaaagttctttctgacaaaatgactttcttttgaaatggacctggtgctgcattttgtatatttttatcattagttttcatttttaatagctttcattttgaaaccattgtagttttgttgttgttattgttttagagacaaggtcttcttctgttgcccaggctggagtgcagtggggcaatcatagctcactgcagcatcaaactcctggactcaagccatcctcctgcctcagcctctttagtagctgggactaggactataggcacatgccaccacatccagctaactttttttaaaagacacaaactccctctgtcacccaggctggagtgcagtggtgtgatcatggctcattacaaccttgaactcctgggttcagctgatctcccacctcagcctcctgagtagctaggagaacagggaagtgccaccacgcctggctttttttttttttttttttggtataggtggagtctcactttgttgcctaggctggtcttgaactcatggcctcaaccaatcctcccacctcgatcctaccaccttggtcctctaaagcgctggggttacaggcatgagccactgcacccagccatctttttctaatattctagtatgactgctttgctttctcctcagttaattgctggccctcggagagtggaaatggctgtgatgtcaacatagaatatgagctacaagaagataatttagaactgaatgatgtggttatcaccatcccactcccgtaagtgctgtccctgtgtcctctacggtggacttagagaactggtcttttggaactcattttggagtcagcacctacctgacctgactgtccattcaaagatacttctttaaaaagctagttgtgaaagaagccagatacaaaaggctgcatgttatgtgattccacttctttgtctttctggaaaaggtaatactattgaataaaaatgaggaggtagagaagaaggtacttcacttcagaggggcacaagggaacttttgggaatgataggaatgttctaggacttgtgtttgctttggcagcacaggtactaaaattggaaccatacagagaagattagcatgggccctgtgcaaggctgacatgtaagttatgaaacatttcatatttataaataagtaaagcaaggaaattgtttttttgagacagagtctcactctgtcactggaggtcactggcacgatctcagctcactgcaccctccacctcccaggcccaggctatcctcctgcctcaccctcccgagtagctgggactacaggcgcacaccaccacgcttggctaatttttgtattatttgtagggacggagttttgctgtgttgtgcaggctgatctcaaactcctgagctcaagtgatctgcccgcctcggcctcccaaagtgctgggattataagcgtgagccaccacacccagccaagaattgctctgtgacttgattgtggtggtgcttactgcatacacttgttgaaatacattgagcacttggaagggatggattttactgactttaaaaccaaattgaacaagccagttgtagatctggagctgtttttatttatttatttattttttatttttattggagactgagtttcactcttgttgcccaggctggagtgcaatgatgtgatctcggctcactgcaacctccaccacctaggttcaagtgattctcctgcctcagcctcccgagtaactggggttacaggcatgtgccatcatgcccagataatttttgtattattagtagagacggggtttcaccatgttggccaggctggtctcaaactcctgaccttagatgatctgcccgccttggcctcccaaagtgctgggattatgggcgtgagccaccgcacctggctatttttatttttatttttttgagacagtctcactctgtcagccaggctgcagtgcagtggtgcaaccttggcttactgcaacctccacctcccaggttcaagcgattctcgtgcctcagtctcccaagtagctgggattacaggcgtgtgccaccacgcccagttaatttttgtatttttaatagagatggggtttcactatgttggccaggctggtctcaaactcctgtcctcaaaatgatccacctgccttggcttcccaaagtgctgggattacaggcgtgagccactgcacctggcctggagctgtttttagatgttggtcctcagcttgtttgtgtagtaatgaagatttccagaaggaggagccatttgtcagtcaaactttctgttttgcaggtttcaaagaaattgagtctatcgggctgaatgtttcattttcacgtgctagtctctaaactttcactaaagatgagagtgtgttcaagggaactgttgattcttgttgaacaagatgtctacattagttacagtaaatttcctaacagcccttttggagcataatttatatacaataaactacacatattttaattgtataatcttgacatgtttacacttgtgaaaccaccaccataatcaagataacaaaaatgtcatgtcaaccccagaagttgagttccaataagcttttgttgtacacttaaatggcccactatctaggatcaactggaaatggtctctaccttatctttttagtaacatttacagtgagcatgcagttattacttcacagtaaatcctagctcctttcacctacccatcagccctcatgattaagcacaatgtttaattatgagcaccagtaagtgtattcttagtgtatctttactgttatgtcgctcagttattgctgcagagaaaatggtactaatttgccaggcgcagtggctcacgcctgtaatcccagcactttgggaggccgaggcgggcggatcacgaggtcaggagatcgagaccatcttggctaacacagtgaaaccccgtctctactaaaaatacaaaaaattagctgggcctggtggcgggcgcctgtagttccagctactccggaggctgaggcaggagaatggtgtgaagccgggaggcggagcttgcagtgagctgagatcgcgccactgcactccagcctgggtgacagagcgagattccgtctcaaaaaaaaaaaaaagtactaatttaattcatagttttcttccctttttgataattcaagcctttacattatcaggtctggttttagtcattcttgtttccaattttaaaaatatactttattaccagtatcccctttaatgggtaaccatcttatcctctacagtatggttattgcttcagaacaatagatggctgccttgaactgttgtaggacttgggtgttggtgacaggtagagttttgtttgtcaagatttagtttactagactatttatagaatgctacaattttgaggcctgtctaccctataattgtggttgtggtggtttcctgtattctagttcagttttgcaatggtctccagaagagacccttacacaacattttactcccgttgtctagaactgatcaaattagaagagatcagaatcagaattagagcaagggcacagagaaggaacataaaagaaccaggaccctgaaattgatagggaagagttaatagtcttatgccacccttaaagtttactttgtctcccttatttaccctatccctaatataaacattgagtgtcactggtgaattaaaagctggtaaatttagaatgtgtaggagtaggtgacactgcctgtcagccgtgtgtaggggtgcagagtaaatcttaactagccctgcttctctcgcagattaaggacaactacggatctgtttctcccatcatgtttccattttgccccaggggtaattgtgctttcacttatcaaataaaagtccatttactggattgtaaatcaaataaacccattggtgtcaacttcaataagtttgaaacattctgaaatctttaaaaacaaattctcggccgggtgcggtggctcatgcctgtaatctcagcactttgggaggccgaggcaagtggatcacggggtcaggagatgagaccatcctggcccgcatggtgaaaccccgcctctactaaaaatacaaaaattagctgggcgtggcggcacacgcctgtagtcccagcaacttgggaggctgaggcaggagaatcgcttgaactggggaggcggaggttgcagtgagctgagatcacgccactgtactccagcctggcgacagagcaagactctgtctcaaaaaacaaatgaacaagaaaacaaattctctcaaaggcctccattcatctccactattgatgtttagagttttcccccactattatcaatctgcttgtttccccattgtctcctataaagagtgctacattatgttaaaattccttatttatagggcagcaacctattggtgcagggtttttggaaacatagccatcttaacacatctgttggtcgcagtccccagatctagtccttaagttggagcagcccataggcatatctgccaaatacctatttttgcatattaactatatctacagagggaattgagtgaaactcttagcccaaggtgctaggacttcatcgtttgatccttgaagttattagcctttttttcccctgaaattgtagtcctagaaggcaaaatttggggatcatatatcaaatttggggttggttttccgtggtggagttctagctctgaacagctaccttgaccagaatgtttctcacaacaggtctggtgtcggcgcgcctgttatcggtgagatcgatggggagtatcgacatgacagtcgacgaaataccctggagtggtgcctgcctgtgattgatgccaaaaataagagtggcagcctggagtttagcattgctgggcagcccaatgacttcttccctgttcaagtttcctttgtctccaagaaaaattactgtaacatacaggtactccattttagttgagaacatatatagggaaagtggtaggacagtaggaacacgtataggatgccagacaggtagcatggctttttgtggtcagataaagctcagaaaaaaactgatgtctcctacaggaattccctttctaattcattgtatgatcgtggtcaaattcttttattgctttacctcagttttcctctctagatcagacaaagtaaagaaatggaatgttaatacagataaaagtacttgtggattatgcaagattcataaacacttagttgcctgtttttttttaaccttatatattttaaagtcgatttgccaaaacaccccaacacatggtttttttaaggccttgctgtcacttgatttatacccaaagaatgaaattgttttatttagaagacaaaattactacaaaaaaaaaatccattctattacaaatggaaattatttgagggttatttatgtcacagctccctttattagtacaaataatcatgagccaattctgttgcaaactctgtcctttaggtaggcaaagcaatggagatgtgtgagctgttccttcggatttttttttttttttttttttttgagatggagttttgctcttttcacccaggctggagtgcaatggcgcgctgtcagctcaccgcaacctccgcctcccaggttcaaacaattctcttgcctcagcctcccaagtagctggaaatacaggaatgcgccaccatgccctgctaatttttgtatatttggtagagacggggtttctccatgttggtcaggctggtcttgaactcccgacctcaggtgatctacccgcctcagcctcccaaagtgatgggattacaagtgtgagccacagtgcccaatggatttttttcctttttttctgagacggagtcttgctctgttgcccaggctggagtgcagtgacatgatctcggcccactgcaacctctgcctcccgggttcaagcaattctgtctcagcctccccagtagctgagattacatgcgcctgccaccatgcctggctaatttttgtatttttagtagagacagggtttcaccatatcggtcaggctggtctcgaaatcctgacctgaggtgatccgcccacctcagcctcccaaagtgctgagattacaggcgtgaactaccacgcctggcggattttttttttttttaagacggagtttcactcttgttgcccaggctggagtgcaatggcgtgatgttggttcactgcaacctctgcctcccaggttcaagcgattctcctgcctcatcctcctgagtagctgggactaccggcatgcgccaccacgcctgtctgatttttgtatttttagtaaagacggtatttcaccatgttggccaggctggtctcaaactcttgacctcgtgatccagccacctcggcctcccaaagtgctaggattacaggcgcgagtcaccgcgctcggcccggatcattattttttaactcatcattcttccagtttttattgttgttgttgttttgagacggagtcttgctctgtcaccaaggctggagtgcagtgcgatctcagctcactgcagcctctgcctcccaggttcaagtgattctcctgcctcagcctcccaagtagctgggactacaggcgtgtactgccacacccagctaatttttttttgtatttttagtagagatggggtttcaccatgttggccaggctggtctctaactcctgacctcagatgatccgcccacctcggcttcccaaagtgctgggattacaggagtgagcttccacgtctggctgttcttccagttttttaatttgcattactaggacccagtttatattattaatattcccctctttttgacttgcttgttgttctggccctaccttagcttcccatatggtctccgtctcccctgtaaatgcttagaaaattgcagcttcctcccttgaatgattccaaagagcagttctctctccctatcctgttagtgacataaccccatcagtgttggaagcaactgtattgaactcaagacattagatagaaatgggtaaattttcctattggggctattcaaagattaggacattataattgctctcccaaaacttcattagaaaatacgaatcagtggttcaagtgttgtattggtgccgttataggtaccattgttacatgtaattaattaagctggacatttatttatttaaaaaggaaaaacctcattggaccagccatgcctaaaaaataagtatgatagagcagcttactgggacttttaacacgagactttgagagcagagcaaatgaataatgtgaagagctagaacgttgccttttgggtcagaatgttaatatatcatcctgatagaatgtctatgaatttcataggttatacagggcagggctgggctgtggccactcattttggagcttttacttaatactacggaacatctcgtcccaacagttgtcttttctccatctagaagaaaagcagcttaatcattttggtggggaagagtgatgctgtgactttcagttgtgaattgaacatttttctagtattttacagttacttttaataccgcttttagggaaattgatatgttctgtaatgagaatgtagtcaacatgatggagactcaaacctcctgctttaccttactctttgtttattttcctaggttaccaaagtgacccaggtagatggaaacagccccgtcaggttttccacagagaccactttcctagtggataagtatgaaattctgtaataccaagaagagggagctgaaaaggaaaattttcagattaataaagaagacgccaatgatggctgaagagtttttcccagatttacaagccactggagaccccttttttctgatacaatgcacgattctctgcgcgcaaggaccctcgactcacccccatgtttcagtgtcacagagacattctttgataaggaaatggcacaaacataaagggaaaggctgctaattttctttggcagattgtattggccagcaggaaagcaagctctccagagaatgcccccagttaaatacctcctctacctttacctaagttgctcctttatttttattttattattattattattattattattattttttgagatggagtctcactttgtaacccaggctggaatgcaatggcatgatctcagctcactgcaacctccgcctcctgggttcaagcaagtctcctgcctcagcctccgagtagctgggactacaggtgcacgccaccacgcctggctaattttttgtattttagtagagacggggtttcaccgtgttgcccaggctggtcgcgaactcctgagctcaggcaatccgcccacctcagcctcccaaagtgttgggattacaggcatgagccaccatgcccagctgctcctttattttaatccctaaatataatccctaaatatagttatatttcatacttagtttgtttttaaaaagttttctctgtagaaaattttaatcattcataccctttacctttaggtttttctttctatacattcagtcaggcactgggatcatctgtttacaggcattatatttatttggcactcctggaacaagtatatctaacccattcttgatttttggactattcaggtgaactatttgaggggtatggggtctagaagttaaaagatacgcatgtcttctgttcttttcccgtatcaattcattccttcatctctttgccaagttgttttcctttcagggcctgtccttccagtttagaacagtaccatgaatcccacttgtgtcaatattaaagatagctgagaagcacctttcaaatggcacagtccctcttcaagatgtctaaaagaatggttatgtctgtccagttagggatttcacatccacatgtaatcatgtctgctgctgttgctacccaaattttcatttctccacattttgggtacttaagctaaaacgtaatggccacagtctgtaatccattcacattcctcagtttcaccacctccctcttccagactgcactctctgtcatcagtcccctcctttctaacagaaatggggttatgattttgaaggctgtgggttcagggagtctttgccaatcctgttggccctaaactatcaaggaggctccatttcaccatttgattttttgcatttcaggaggcaactgattgtttcgatatgtacatattactcacgtataccccatttccttccagtcagcccaacattttccaccagtctgtccccatctctgaaatccttccttctctttccccctaagtcttttgagtgtcatcatgtactggtggtttctcggttccatctcatccatttccttttcaatggagactacagcgtcagccagctcagccttggcttttaactcaatattccagtccataggggtggttaaaagttgctgcaaggctgcaggcactggcagtgggaagaggcagacgactagatgacttctgcacttttagctggttgaaaagtaccactcccactctgaacatctggccgtccctgcaaagagtgtactgtgcttgaagcagagcactcacacataaatggctgtgtgtggaattgcttgccaaagaagtttctagcctttccctttcccctaactgcatcagggaagaattcttatctctagcttggtttccacatgaggtttttctgagaagggcttgggacaagaagtctgtcatgttagttaagcaggcaagaaatcctactaatccagttttgtttgaaagttgtttgtccgtatgattttttaaaagtcaagtttaatttcaaaaaaccttttttttctgagattacttttggggtaatatttaaaatgagagacattttgtaaccctgtaaaatacatagggaatataacattccagtgtatacaaagaaggcaaattctttaatcaaataaagcgcattataaaatgagatgtttattggattattgactcactttggtgtctgcttgttgattcaggatgctgtaatgggacctaacattaaaaattaatgacatgttttttttaagagaaagtaatctgtgagagtattcattgcctttttccatcttatatgtattgtgcttccttgcgtatttttctacatttgatacatgcactcctgacagtgtagcttttgaatttgatgctacttctggcctttttggggattggagtcttaattttgtcagacggcagttggagagtcaaaaaagtcaggcttcatctttaatcttggagtcttggagtcttctcttccccattagaccgtgatgagaagtgatccagggatgagggataatgggaacaatttttgggaactgttgataattccctcagataaacctgcttactttttttttttgagatggagtctcgcttagctgcccaggttggagtgtggtggtgcgatctcagctcgctgcaaccacggtcgcccagcttcaagcgattctcctgcctcagcctccagagtagctgggattacagtcacccgccatcatgccgggctaattttttttgtattttcgtagagacggtttcaccatgttggtcaggctggtcttgaactcctggtctcagatgattcgcccacctctgcctcccaaagtgctggattacaggcgtgagccaccgcgcccagccttttttttttttttttttgagacagtcaccaggctgcagtgcagtgacatgatttcggctcaccacaacctccacctccagggttcaagtgattctcctgcctcagcctcctgagtagctgggattacaggcattccacaccaccacccccggctaatttttgtatttttagtagagacggtttcaccatgttggtcagactggtctcaaactcctgacctcgtgatccgcccgcctcagcctcccaaagtgctgggattataggcctgagccaccgcgctccgccagagctgcttactttcttatgcttttttaaaatttaacttggaaaaactattgggtgtcaaaaaattggaaggcaaattattctcacttattaagtatctgggatgagaaatttctaatgttgaaagccaagattctgattttttttttcttggtgaaaaaaagtatctggtctaatgttgctcaagtgtggcttagctgtctgagactgtagccttaatcgaatgaaatgattaaggtctgtcattcctttactcaccatagcttcaaatttgtcaacccatgcatctctgatgggaaactttgccctccaattaatttttaaattgtgaacagttttaaagttgttcacactggctagggtctgagatttccagggttgatatagaatagctttttattaaacttcacatctgacagggcttattggaaggagacaggagaaaaatggaaaaagtcatcctcaagaagattaaagtctaactggaagcaatgactatctgcttgtgaagcctttttttttccaagttagacaagtgttaactacagctagtactaaacatggatctatatgagagtaggtaacatggcttctgtcttgtaggctctagaggaatctcaagcaaaacctcacaaatgattttcttttgctatgcacatctgtcttattacaacccccttacccccaattcccttgtcctagaagatccacaagtaggttggttgctgtgcattgctgttacccaagggcagacagcaacactacaaatagctgccttaacgtcttatcctggggagttggggattgatacggaggtaggcctttagaaaaattagactatctttccaaaccaggctgttttccctctcacaatcacaagtcaagctattaggcagttttcagaagcttggaccacttctcccatcccccaccgcagtttttttgccctgctgttcttagggcaggggctaagtggttatttagggtctaaaccaatactggaaagcttccctaggtttactctgggtgatcagattgattaccaaaccaggacaggggctgtttgaaagaagcattagaaattcaagacaatgagagaaattgaaataggtcttgtctcccattcttttgcccaaatgaatgcttgttcttttagctcattaggaaagcccttagccttggaggtacacaagaccagtcttctgtcctacccaaatttcccacttagcttggatgcatgttagctttgggtcgaagcagactatgcaatttctaagacagctgaaaagagagctttgaacttttccccaagttgctgcagggtcattgctaccaccacgcctacaccaatgatgcctgacttcaggatccagaggccagaaacggacagctttctggaagagggtgtgtatctacaaggattgcttgctgtatgagcaataatcacctctctggggctagagggagtacaatttgagaggtgggacaaagtggggaatgtgccaaggcaaaagcaggagtatggaaattcactcctgacacttgtagccaatgcaaagggccttagaaaaatccactcttccttccacacccaggctttgccctctccccctgcttccacttcggaaagtctgaagcaggcctggaaagctgttttctgctttctttccctctcttcctccccctttcctgagctcccagctgctcgacctcttgcgtaactgtgagagagcgctgagttttttgatgggctccagatgtggagcagggcggagatggagagtgggggcggtaggtctttagtcccctgagtgctctaactgtgggaacatagaggcctgacacagcaggggagaggacacattgcacagcgcctttatcatagggtcagctggtccctgtgttgggaggtcagtgagagaagttgggtgctgtttcgaccctctgcctcagcatccactgcctccatggcaggcttgattattccctgaaattcctcctgcccagtacagtaaagaggagctgggggccgtgaaacagaatgaagtgaaaagcctctgaggtactgcaatctggacccctcccctcagtgctgggtcttggcacatgggatacaacagtttgggttttttccttcttcctttttttacatacccaaatagcctgaatattactgttgtgatctgcctcatgaaggttcatcagaattactttcatgacttcaaacagtatgaagagaggaaaaactagagtctcgctcctcaaatcctaggacttcctggtacccacagcatattctggatcttgagtgttccacctccattagctatagcaggtggcagcaaagggcggcctctcccctccccctccttgtctgctgcttggccccggtcagcttcagtctccagccgtggggggtcccctgctaaggccagccctgtcaatgagtgaccagagattcctgtagttcagcctcctgctgttcctgggttagggagagacggcacaaactaaactcattgaattagaacagcacttgtccatctcaaagaggataaattattttttgctatccaccccagctggaatttagaccagacttacaggctttctgctccttccttcagtgaagaagagtctccagggtccctctagtgcaggtcaaagaagtccagtccagctgagttcagctccctagggcctccccagccagtctcctggaccaagagctggctttgcaaggtaaggatccactgtcagcgttggatttcggagtggaggttgagatggagaatgacttcaacctagctcaatttgggggctgcttttaggtgtttagtgcctccttctcttccttattaactcccactcctactacaggttggtgtgctcaattgtatgtctatagcctgcctccatctcccaatctgtaatccagcaagtctgtcggggtggaggggtgtggagctccatgggggcaagatgataattccattcggttttcctgtgctttggagtttgcatgacactttaacgagtcttcttgtgcctatccttaagaaagtctgtgaagcctgatgtgcgtggctatcaatgtcatttacagctcttcatggtggggcttggaatagggcgaggggaggaggtgacagggagaagacctgggtaccctcagtagatgttctggagatgttgagagcatgttgtaggggcttcgatttgggaggttcagtgggagcccgtggaggtttcaggcatctaaggcaaaaagaaagaggggagagtttgggggagggagaacggattgtcaaaaacaccctctcaaaagcgtgttaaagcctgggagtggagggtggtctaggagagtcgggagggcagggtgggaggagagggggatgtgtggtggtggtggtggtggtggtggtggtggtggtggtggtggtggtggtggtggtgatggtggagagcccagctgcaaagatgaacaaagcgggcgctgtgcaggctgggggaggtgctgctgtgggaaagggtgggtggggggaccttgggctccagccccacaagggcgtcttctttggctggccaggcggacgggacgggggacgggggcggggactggcgggaggggggcgggacaggctcgctctcctcctacttagcgagctcccggggaaaagcaacggtgtcctcctaagcctgaggccaccgcgaccgagccgagccaggctaagggaccagtgtctccctgccccccccccacctctaggtaagagcgccccgtcccactacacttgcgggtcccattcgctgcggtgctaggactggataaggggaagtccccggggcctggcgagagccctgagatcagctctaggctagggagctcggcagaaacccgtgggggagagagggcaccccaggtgagtgcgtgggggcgaaaggagcgttatggggagttttcctgtgagcctcttgcttttgccttcctcggccgctgccaacgccaccgccagagggggccgtgacgctctcccccccttggagaaactctgatcctggccctatccagactctcccgccggcacccaggcggccgggcggacactcgcggggtatcgggcggcgagcgcgcgcgcgggttttcgtcctccagcgccccacacctccccctctccgcccacagcaggaccttggggcgggggtatctcctgtgacgtctccccgcctgtccccaggccggccgccttgatggaccaggaagggattcggagtccggctcagagtcttgagcgtctaggagggctgcctgggggtgtccaggagatgggaagcccgcctggggcctcccaggcactccccaaggccccacgtcctcgggggccggggaggccgcctggggcgccttgccacgcccgcgcggtccctattggaatccctagcggagttccccgagcggaggctgacccaagtcatccgggctcccccgggatagggaagtgcgggcgggcggctgggtaggggcgccggcgcagggtggccgagtcgcccgctagcgcttccgccgaggcaggctcgagtggggacttggccgggcgaccgcacagccctgccggggacccacggctctggggcggggctgcattctgggccgttagctcagcggtcctggagcctcccgaggctgactcatcgggcggcgggctcaccccccagccgtcaaacgcaaacgcaggcgccccaccacgccgggctcccacgcggcacacacgcacgcctccgcgacacttcgcacacctacgtccctgcgtcacgccacccagacacacccggacccgcccacacgccgaggccttcccacgcactccatgccttacgcctcacaggaaagcgccccgcgctcacgcagcccctcacacccgcagccccgcttacacgcgccccagctcacacatgcaccccagtcacacagcctacctcacacacgcaccccagtcacacacacaacccagctcacacacgtacccgtcacacatgaggccccagctcacacacgaagcccagctcacacacgcagtcccagctctcacacacacaccccagtcaaacacgaggccccagctcacacacgaagcccagctcacacacactgccccagttacacagcccagctcatgcaagcagcccgtcacacacacagcccagctcacacacacagcccagctcacacaagcagcccgtcacacacacagcccagctcacacacacagccccagttatacacacacagcccagctcacacacgcagcccgtcacacacacagctcagctcaatacacagcccagctcacacacacagccccagttacacacacagcccagcttacacacacagcccagctcacacacacagcccatcacacacacagcctatcacacacacagctcagctcaatacacagcccagctgacacacgcagcccagctcacacatacactccagctcacacacgcagcccgtcacacagccccagccacacacacagcccagctcacacacgcagcccagctcacacatgcagccccctcacacatgcagccccagtcacacacacagcccagctcacaccgcagccccagctcacacacgcggcccctcacacacattcagccgcccttcccgcagctgccaggctcggaacgggcggtgtctgtgggggccgccccgtttcccggccgcgcaaacaagcggctccttctctctgccccgccaaagaaaggccgcttgtcaggggcgggcgggcaggcggcagcggcaggcgcccaacactgcggccttgtcccacgcgggcagcctgggcaggagcaggccgaggggtgcaaggggccgctaccttgcggaaacctccctccctcggccctgcggaccgcggagaggcacctttccaccaccggacacccaagcaacagccctcgctccatccgcgctctcccggctccccctctcctcgggccgcccatctctcctctcttccgcctttggggtcccggtgggccccagcctccctctccttcgccccatctccccgcccgtcagcctcccctccgctgccctcgcgcatccccagtgttcccgtctgtcgtcgcctccacttgaggacccgcctgtcctttcttcccccgacccctccacctctgtgttcttcagtctccccgcatcctctgccctcggtcttcccctccccagcttgcattttttcccatctcttagtctgcctttcattttccccttcacatcccggtggctccccttccccgccccgtccctctgcacacccccattcatctctgtcaggtttttctcatccttaagttctctcgtccccctccccactcgggcgtcccccgctgggctccccgcctcagtttccttcccttcctgactccttcctctgacggcggccctttctcgagggcggatgtgcgcctggagggcgaaggcggcggccgagaggaccccagctcggcctggcgggcctctggccacagccatgcaccgcttgggccgaggccgaggccgacccccagggacacaggtgaggccgggcgacccgcggggctccggggagcgcccgagcagtggccccgcgaagggccgggtctggtgctctggggctggctttggacctctcgtcctgggactccgtgggagcccgggagctgtgtcagtgcccgttggtgctggagccagtcggcccttccttggcctccttcaggcgggggccaagacccccgagagttcactctgggtgctccactcggcggagagggcttcagactggtgtcccgcgtggctggggtgtcggcgcattcccgcgggggaggaggccgagggcccgggccggggtcacctgccggcgccccggccttgcgcacagagggccttgcctgtcgctcgtcaaatccagacacctgggcctccgccactcggctgccggggcggcactggggcgtctgtacccagcgtgcgggagggcacccagggccggacgcgcaccgcaggggtctttttttggccgcggggccgggcgggcgggtaatgacagccgggttgctggggagccgcgggccagatggaagcggggccgcaggtgagggacgtccctcgcgtagcgccactcagccgccggggccagagcgggagtcaaggtgagggcgcccccaggtggccgctctcggccgcggcgatcgccctttgggaaagcaccgcctgagtgcagggcaggttggcctggtgtctctttccacttctcttggatcaggttactgtgctggggccacagcctcgcacctcccaatctctccatcttttcttatcttctccccacacctctctccttatctctccctttactttcgcctccttattctcttctctcctctaatcactcttgttctccatcggccttactcctttacaatctttatctccacttgaagttcttgggtgtaaataaatgagcacaccacagctgccccacacggcgatagtgaccaatactccaatatgacagataaataaactaacgcccagacaggtgaactgccttgctccaggtcacacagctcataataataaacggggccaggcgcggtggctcacgcctgtaatcccagcacttcgggaggtcgaggcgggcggatcacctgaggtcgggagttcgagaccagcctgaccaacatggagaaaccccgtctctactaaaaatacaaaattagctgggcttggtggcaggagaatcgcttgaacccgggaggtggaggttgcggtaagccgagatagcaccgctgcactccagcctgggcaacaagagtgaaactccgtctcaaaaaaaaaaaaaaaataataataataataataaatggcattaagtgctttgctttcacagaatgccatttaatataatacctgaatttcagacagtcctttttaaaaaactgacagctttattgaggtataatttatatactataacatccacccaatttaagtatgcaattaaaagatttttagtatatttacagagccatgcaatcatcacaatttaatttgaaaacattccccccaccccacccccaccaaacttgtgcccttttacagtcactcctcattccacccctagccccaggcaagcactgatccagacagtcttttttatttttttccattactctagttttatagaagaataacttgataatcagagaagttaaataacttgtctaggatcttatagctaataaataaataaagtcagggtagaatttaaggctttatatatcccagtctaaagttctttctaccaaaggatgatgtttctccttcaccattatttattattttgtttttcttaaccccttttttacataaactccccattcccaacccactctcttgcccctcctccctcagaaaatgctgagggatttccctgagtctaaggaagcagtacagcaatctttgtccttggaaattcttctccatggccaggaattctggggaggtgccaggccagcttggggctttgcataggttaatggcgttttccctcccctcttccctggcagtcttggggtgggccccagcctgggttccggcctctcttccgccagcttgggtggaaatggtgacggagatgatgcagtccaggtccggaagggtggaagctgggagggtaaatttagtaacaccatagctaaggtcctcgggacccactgccagggtcagacactccttggaatgcgggctgctgcccctacttcctttccaagtcccctggtagatggcttgaagagagagtggaaggaaaccctgtttccctgggtctgcctccttacccctcagccacactcttagctttccccagtaacatttcagcagcaagtgggaagtttctcagcttagctagttggccaagggatgggcatgggggcatacattagtacacaaaggtcctcacatctcagataccaaaaacatgagccagggagagagggatgcatggtgggtgaggggcagtggggtggtggtggggagtattcaagttctggctctggaatctgtcttactcctggttctaatggtttaagcttcctatagcacctagccaattaagaacccaagagttgagcccaatattcccagtattagttatcactaaagttttttgtttttaattaaaaaaaatttttttagctgattgtgttgggttgaggttgctttctggggaagaaaaggtgtaggagttgagacatctggagatagcaggaatggctgagtttttcttttgtgtctcctttaagaaaacatcctactaaagccctgggaaaagagacaaatggtgaagaggagaatgaaaggttgcaggagggagctcctgttttagccctgccacctacctgggggccctctggctaccagtgtccttggaggggcttccttgctgcttctcccactaaggtagattttccccaccctgcttaaggctccacagggccaagggtcttcagctgtcaaaacccgggttctgagtagcatagggcaagaaagcacagaagtatagattgggccctatgggactgtttgtgcttacagtggcagggggcaggactggtatccatgctgtggctggctggagacttggcactgctcccagacaactcccacccaagctctttagctgcctctatttcccttcagcatgagcatttggggaatgatggtgactggtgacacctctgccctgagaaccctgccacagaacctacttctttccctctcctgccctggcctccccactcaccacctttctgctgtgtccctaggagctctggagccttaggaccatggacgctctcaataggaaccaaataggccctggatgccagacccagaccatggtgcaggtgagtgggatcagggctgtgaggcaagagagatataatagggatgggatcagctcttctacccccttgtggtcccagcccaaggatgaaaggagcaattctgttcctctctgcccttccccaggtcccaagcctattaacagctcagtctttatctgaatcaggttaattggttcacccagaaactacccatcgaaagtccgaaagcagtttacagattgaccctgggctgtatcactctccttgatccatgcctctatcttccctgtacttgagcttagcaggggcaagcaatggccacgtggatagccatggacaagtctgcagggagcttgattggccttcctctacagtacccctgctgcttatccaatgccacccccaccccccacccctttctccttgcttctgttttaatagacaaaaggcacagttaagccaagacttgcgataaatccagtgggatgagttagtggcctagattcagatctaattacaatttagtggaatcatgctctgtgtaagattttgtgctaagcctttcagcaccctcagagcccttcggagaggggcgagggctggagagagtgctggtgtgactggtttagggtggtaaggtgctgaatctaatgatgcttgtcctccacccgtactacctacagaaaggacccttggacctgatcgagacaggcaaagggctgaaagtgcaaacggacaaaccccacctggtgagcctgggcagtgggcgactcagcacagccatcaccctcctgccgctggaggaaggtaagtgtgaacagggcatctcactcaccacccctctatccttataggcattcctgccctggaggcccacctcctgcatgtgttggggcccttctactgtctgctggtgctcgcctccccacaccaccagcttgcttcccttgtctctgcctccccagactgcctgccttccttggtagatgatctggttccacgactgggcttaaagatcagcttagaaacaaggaggagaggccaggtgtggtggctcacgcctgttatcccagcactttgggaggctgaggcaggcggatcacgaggtcaggagttctagaccagcctggccaatatggtgaaaccccatctccactacaaatacaaaaattagccaggcgtggtggcacgggcctgtagtcccagctactcaggaggctgaggcagaagaatcgcttgaacccaggagacagaggttgcagtgagccgagatcgtgccactgcactccagcctgggcaacagagcgagactctatctcaaaaaaaaaaaaaaaaaaaaaaaagaagaagaaaagaaaccatgaagaaagcactgagagaaacaggagaacacattgctcttagcaaccaatgtggccaagaagaaaaagggccccgctccagggcattgtcttgcatgggagggtataccatagatggagaatggagagatgggagtcagggcaagatctcccaagatgaggccctggcacagcccccttcacctttcagcttctgcccgccctctctactctcctggctgcacttgttgcctgggtgatactacattctccacattctccaaataccagtcccaggggctctgtcagcgggaggggctgttcttgctgcagttaggggagagcctgcactgaagagagaggttgcactgaagagagaggttagcaagggagacgaagtgttgcaggtagcagaagcgggggagagaagaaggagagaaagggagatttagaagaaatgaggagtaggatgaaggggaaaaaggataaaggacaatagggagaggcagttgggggaataagggaagatctgcagaaaagcagtcttccttctccatctgtggagtctaggtcctactgtgtgctgtctgggtcttcccatctctgggcctcccattctcaggcagagttttctctgtttgagaacagcgtccatcacttactgtatagaccaggctcaggggcctagtaggggtggccagtggtgggcagagattctccctggagtaggaggtggaaatatgtttccactgtggccctccttgccctgtcactgcctcctcagcctggacaacccctctgattcagtttgcctcttgtctccagggaggacggtgattggctctgcagccagagacatctcactacagggcccaggcctggctccagagcactgctacatcgagaacctgcggggcaccctcaccctctacccctgtggcaatgcctgcactattgatgggctccctgtccggcagcctacccggctcactcagggtaaggctggacacctccagatggagggggcctctgtttaaaggcttgtgtgtattaggcacaggggaggctggctgtggtggttgccatggtaactgcctgagtgaccatactgggaatggagtactcaggtgcatctggatgtgcctaaacaacatcccaaaccctttcagcatccagacatgttttcaacctgcttttcttctctggtcacccccaacctgtctccacatactatggggagagaagaggttctgattcccgccatcagagggcctggggcatgatggcgttgttaatggttgttggggaagagcaattggagcagcagtgagagggtatcaatggcattgttccatgatgccaagaggaagttgttttgagaagctggagaggaggacaatacttcctgatggggatggggcaagggtaaatctcaggacatgcctgctcctgttacaagactgctgacagtaacttttgggtcacgaatataacccaaagcaataggccattctgttgtgtaaggtagctctaaaaactaggcccctggctaggcatggtggctcacgcctacaatcccagcactttggtaggccgaggtgggtggatcacttgaggacaggagttcgagatcagcctggacaacatggtgaaaccctgtctctacccaaaatacaaaaattagccacacgtggtggcacacgcctgtagtcctagctactcgggaagctgagataggagaatcgcttgaacctgggaggcagaggttgtagtgagctgagatggcaccattgcactccagcctgggcaacagagcaagactccgtctcaaaaaataaataaataaaaaataaaaataaataaaaactaggcccataattactatggttagcaggcaggtaagcggttggcccaggtagcactttgacagaccaggtgtgctcaccctggaaacagggttctgggcatcagttcatacagtgagttgtcagattaggagaatgagaaaaacagatttgggtggaggttagaggtgaagttaaaggctaacagcaggacaggaactttgggctaagcctggctctgagcaggctctgatggtctggcattgttttctgggggctcttactgcctagaagccccttggaagtggccatcctactcactccactgtctccttctctcctcttcatcctccttaaggcctttcaatgtcacttccttcacagctgatccaggagacctgacatttcccccgtctttttttttgatacggagtctcacgctgttgcccaggctggagtgcagtggcatgatctcggctcactacaacctccacctcctaggctcaagcgattctcctgcctcagcctcccaagtagctgggattacaggcacctgccaccgcccggctaattttttttttttgaccccagtcttttcttcctgccctcgggtagggggcagggcatggacaattgacttcagggaggcaggtccaccagcagcagtacgtaggcccttgccttctccagggattcaaggtctctgactttggatgagaggaggaacccccaaaaattggggcttggctatgatggcagtgggttcctaacagtcctgttcagtctcagagagagcatcttctctaagatttgggagcatggagatgagacaatagagcagcaaggagaggcagggcaaagttcaaagaaggcccagcacttaccacccccgccccaaacccatcacattcatcggtaagaacattgttcccctgcatgttgtgagcagggtatgcttctgttgtccagtctttccaatgcatcatttagctccctgagaaggggagagcctagggctaagatggaattctgaagcatttcctgtggccccagtgacccttcccgactcttctccagccagaggcctacccagccaagtatgtaccctcccactctcttctgaccctaaaccccttcccattttccctccccaacccccatagccttcttgtctgggctcgcctgtctcagaagcttggcagcctgtggaggggtaggcagaggcacaaaggaatgggtgttcttctccccagtcctccccctcccctgggctccaggagctgagggtttccttgtctcatctctggagcaaggcaccaagcccagccctgcctggccccactccggacattcttgggagtgtgtttccctggaaactgggtggctcgggggtgcatgtgctatctctgtgtgtctgtgtaaccggagtgtgtttatgtagctccggatgtgtttgtgactctgggcttacgaatcctgtgtttgtgtctttccttgtgtttatcgatcagtgtgttcaagtgggcggcaggggtgaactcaggactgatggtaccaaaatgtctgtgtgtgtactcctatgtgtatatgagaccccactagtcatatgcctatctgtgagcatatatacaagacgatcattttccctaccttgttcccctaatctggccttgtagacgggaccctcctctttcaaaaacaagggctactctgggaataacaaggagtgtgctttggccttagatgcatcattctgggcactgtgcccagccataggcaacttggagagacacacttcatgacaagcagagatggcagtgacaggctcttccagcaggaatatgcctgggccaggggaaaggggaggcaggcagaaaacagatgccaacctttagcacagagctatgaacataggagcatgaagtgagggagccaggaaggtcctgattccaccccctgtacccaggcatctcggcacatcccacattgccctcttctctacagagcaaggggtggagctgggaataggaccaagggaatgaggaggaatctcaatctgggtctaggctgccccaccctgggaccacagcgccagaccacatgaaagatctgggagggaaccaagcaggggaggacccagaaagccaccagctcagggcccaggctgtctagacagtaggtccccatccactcctagcatttcctccgagccctggtctccagtctccttcattccctaagcctctcactggtgggtaggggcttgtgtgagggccagcagaggagtgtggctggggagccggatctctgggttatccagctgcctctctctgggatctaggacattcagcctcttttttttcccacccagttattccatctgtaaattgggagtgaagccttcaacctttttctgttatgagactgataacgatcttgactaataaagctcaaaagaaggagggcagagcaaggctcccagcttcccacttctttgtgtctgcctcctgccctatttctcattggcgggcatcctctgtgtctgcctaggtctatccagctggccctcacagtttccagaccgatgaatcactcttcctgaggagattttttttaaagcctcccttcattttgcatttgaccctatatggttcttcctttttcctcagaagggaataagatacgtgtgcacatgtgagcgtgtgcatgtgtatgcatatagttggcagcatgggtgagtgggctagtgggctgtttagcaagaatggaaaacttgcctgattattcatctaagaggttgattttatttcagagtttctccagggactaagtgaaaggaaagctatgcctgggtgagtgtgtaactaaaaggagttgtctgggggatgtgtgcatgagaataaaggtgtgtgagagacagtgtgtttaatgagggtgtctgtgtgactcagagcatgcagagatgaagtagtgtcagtgtgactgagcaagtgttggtgtgtatctgagagacactgtgtcaggctgtgtgagctgctgagagcataaaacattgtgtcccgtaaggctctggtgtgcaggggccaggtccctggaacaagaggaactctctgggggacctggctggatggtaggtattaatacctgactgggccgggtgcagtggctcacgcctgtaatcccaacactttgggaggccgaggcgggcagatcacctgaggtcgggagttcgagaccagcctgaccaacatggagaaaccccatctctactaaaaatacaaaatttgctgggtgtgtggtggcgcatgcctgtagtcccagctatgggaggctgaggcaggagaatcgcttgaaccccggaggcggaggttgcagtgagccgagatcgcaccattgcactccagcctgggcaacaagaatgaaactccatctcaaaaaaacagaacaaaacaaaacaaaacacctgcctgactcagaatctcagcctgactttgcgggctccagatatctgtttcccaagtaggatgggtaccttattggggtcggagggctctttgctgggtctagcacaactggatgttgtggctggggtgcgggctggctcccaggggcccaggaagtgggctggccggaaagggcagtgccttggtccactctgggtcatgagttgagctatggggagtggggccggaagaggaggtgtttagggtggagacaggaggtgggctgagtgcttgcattgtacagagcactgctttggcctgaactcccagcccagggtgaccttgttacagtggcagcctgagggccagagcaggacccagtgacctagctggatcctgtagagcccctgctcttttcctctccctctctctctcagatatggacccatggaatgtcagagttgactttctgtagataaggaagccgaggccagagggtgtgactggcccaaggtactacagccagtcagggccggccagcccagctgccactgacctcttaccacagggggctgggaatgagacctgtcctttgcttggcctcactcctgcctcctggctcttcactctggcctctgtacttacctctcacctttccttcactcagtcacctcccttgaacctttccttcccgcccacttttcttcctgccctcgatgcaggatcccaagccggctccctttctgcatcctcccgccccgccctctccatccagctctccactcgtctcctccatcacttcctcttcccctcctcctctcctttgtccctccctccctggctcccttcccccgccgctggtggccggcccgcccctccccgggcattggcggctgctcgctgcctcgctgctcgctccgagcctagagccggcagctcgggaggtcggcccgccccctcaaaggctccgggcgggcccgggacctggagggcccgagctagcgggggcgagcggtccggaggtccggtttcggcggtgagtcctcagccccgggccagccacagtccccaagcagccaagcttggagaagctcagactgggaggggcgtcttgaggagggtgggcgggaggaggtgcatggggtcctctgaccttctttgggagcttgaggctgagagactcgattgtgtgtgttccctgaacatttctaaatggggattctgggcttgggggcacttctcagccggtagaccttatcttctccagcgctccggcagtcccctccttaggacccacctccctcagatggggttaaagagtcctggttagaatgaggggagtctaccttatggccaaggagggtctctgataggaaggaccaaggcccttcctcccatattcccttcactcggtctccctttggacaatccattctatttgtgtgaccaggagggcagtgacagtagctctgagagtgtgtgagcatgtacgcccataagtctgttgtgttactatgagtgtgtatgagtgtgagcctgtttgtgttggtgtttctcctctgcatctctcacagataggattcaccctctccttcgcccagtttttcccctccagatgtgcagctcctccacccacctgcacacagctggaccctgatcccccctgggcatgggggacactgatcatgactttggcaggatgggcagggattcctgggctccctgaaagggctggcctttgcgggttggggtgggagtgggcagagaggaggcttcttcccagaaacaggctggccagacccctgggggctgtaggggccagcatcagggcaatgcctgaagcttctgcatgcaaatagaaagttaatttgggcaggagctgggctgctctcagtcctgctgccctcctgcccgctctattaatacggatccagctctgctgcctggcatcactatttatagcccagaggcagcatggccacacccccttatgccggggagggtgaagggctgaggagggggcagaaaacacacagctataggggcccaggcagaggatccctagatgcctacatcctacttgggtgggcctgggactgctgggctggaatccactcagactccctgcctccttcccagcctggactgtgtggtcaggctcctgatccctaccacccacgaccctgggttgagtggctctgtctagaccctgtgaactcatcaccagtaggcttgttaaatggctaaatggagggggaggggcttgacagggctctttctgaaacagctgtggttgtaattaggtggacagtgtggttggctattatttattccagttttgaatactctgggatcctcttctctgattggtgacttggcagggaaggctccctctctctcctttagaattgttggtgtctggctgcctgggagggcctttgtgtatgccaggatagtgagtggctttatccactatggttatctgccatgggcttctcagcctactaaacccccaacccaagcaatgcccaggatcccaggaacaggctcctgagcttctcagtaagggacctgccaaggtactcacgtggcctgggatgcctcttgcccttgcggcctgcctgagctgaactgtctcagcgtccaggaatgtagacttctctgccagtcttagctcagactggcgtgaagcttggggtgccaagtggcaccagattgggtagacaggaggctgaggccgggggccaggggtgtggacaaattggaaggattggtggtagagagcaacagggctctggcttctcccaacatagtatcttctgcagtagccctccagcacctggtgtggctgggaggtggagttctgctagctacagttaggcgcctgtgggcacatctgccactgtgcacactccaggtgcccctggctacattttccagctcccacatgccctccccctccaggtactcacacttcccgggcaggactgggcttgtgtctactgcctgggaatgtgcttggctgaggccgggcctggtggcctagtcttggcctgatgccaggggagaccagggagcatgcagagggtgcttagtcagaaagaaaggtggtggtcgctccctagacttgcagtgcacagctctcctaaggtcacaaaacaagaaagagtgggagcaaattcaggacccccccggttcatctgactgatccatggtttttccccttgttccctatctcagtttttttttgtgaccctggaagttgctgcctctcagactgactcttctacccttctacccaaggggcagatagatggatcatggatacaggctggggttgggggacaggtgtgtctgtgttctctgaacatttgtgtgtgtgtgtgtgtgtgtgtgtgtgtgtgtgtgtgtgtgtgagacggagtttcgctctgttgcccaggctggagtgcagtggtgtgatctcggctcactgcagcctctgcctcctggattcaagcaattctcttgcctcagcctcccaagtagctaggactacaggcgcacgccaccacccccagctaagttttgtattttgagtagagacggagtttcaccatgttggccaggctggtctcgaactgctgacctcaggtgatccgcccgccttggcctcccaaaatgctggaattacaggtgtgagccaccatgcctggcctctctgaatatatttttacagagtactttcacatacactgtcttattaaccctacaagatcagtggtattgtccccatttttctgattaagagaactagattcagaggtgaagttacttcacccagagatctcacagctagtaagaagaggaattaggacgaggactcagatcttgggactcactcaccagtgctttttctactctgtcttgtgctgcggagccctggaggtgcccatctcaagcacaggcaaggtcaggtgtggactgtgtggactctgagagcagatgaggatgggtctttagagctgaggtgagcctgctagtgctgtgaggtggggtaacttcagtcctgcctgcccttccaagtgttttctctctttcttcctttcttttttttttttttttttttttttttttgagacagagtttagctcttgtcatgtaggctggagtgcagtggcatgatctcagctcactgcaacctccgcttcctgggttcaagctattctctgatctcagtctcctgagtagctgggattatgggattacaggcgtccaccaccacacccggctaatttttgtatttttagtagagacgggacttcaccacattggccaggctggtctccaactcccgacctcaggtgatccaccctcctccgcctccaaaagtgttgggattacaggtgtgagccaccacacctggtcttcaagtgtttgctttctctgcaggctgcatgttgtgcctgggtcagtccaccttccttcgctttaaccacccggctgaagccaagtggatgaaaagcatgattccagcagggggccgagcccctgggcccccctacagccctgttcctggtaggtaccgacgggggcagggtgctgggttgatggtgttcctgcagcagtcctcctccttgctcacttcagccacacttggagtgttagggcaagacaatacctaaggtctgggctcactgccacctgccatgggcgggtggagaatgccaggcagtggggccactgagagctaaccaaggcagtgctgcttagctaaaattgggaaattatgtgcctcgagggatggcaagctctgccagcttgtaccccactgccctggaggatgccactcagtgtctggaactctggcccacttgtgtcaccacagggagcctcaccctctagggtaccctgaggggcagaaggaagcattaggttgaactccctgtaagctgtggtggggatcatgtccttgggcctcgcccaaccctcactccatgccctgcccgctgatgactcagtggagcagctgtattttgtgtgtgaattattgatccccagaagagaattggtgattgttctggggaaccaacacaggccccctcagcccagctgcacaggggggcaggaggggtgcagaccaggaggctattatgggtttaccatctcagactttgcactggcatttagatggctatggggtgacaggtgctgggacagatggacatggatgtcaggtacacctagtggggtggtatcagcagcctaagtggatagcctggggacctgaagaaaggtgagtgatcactgggattatcagtatccatggcatcccctctgactatatcccacacagtctccataattttggacccaaactcagtcttgcaaaggctttcccttctcttttccctaccctcgatcttttccagtcctctgggggctcagaagcctgggttcccagtctactccctagttaattttaccctgcccccaccccagccttgtcatgtcactcccttagctgtttggggcagtggttccagggactcctatatggttgactagtgctggggcatggcaaaagcaggctcttgctggcatggcttaatgggataattggaggcactgagcttcacctccttgctggcagcctggcttccaggaaccagccattagcactagctccctcccctgcctctgattggacgaagtggtgcagcacacacccctcacccagccctgcaggcttttttctttttctttttttttttttacccctgggcctctggttcctacattgggaggccctgacatcctattagactaggagcccctggaacttctggccagctctgcagcaggcgcccatcttctttgtataatgccttctgttttcttttttctttttttttgttttgagatggagtctcactctgtcgcccaggctgcagtgcagtggcgcgatctcggctcactgcaacctccgcctcctgggttcaagtgattttcctgcctcagcctcccgagtagctgggactacaggtgcatgccaccacacccggctaattttttatttttagtagagatggggtttcaccatgttggccaggctggtctcgaactcctgacctcaggtgatacatccatttcggcttcacaaagtgctgggattacaggcgtgagccaccacgcctggcctcttttttttttgagacagtcttgctgtgtcacccaggcagttctcagctcactgcaacttcctgggttcaagcgattctcatacctcagcctcctgagtagttgggattacagacatgtgccaccatacccagctaattttttgtatttttattagaggtggggtttcaccatgttggccaggctggtcttgaactcctgtcctcaagtgatctgcccgccttggcctccccaagtgttgggattacaggcgtgagccaccgtgcctggcctacgtgcccttcttgaggagggatataggatatagattggaggagtctagtcttggggtgaattgacaacaatagtcttagaagtgcctatcattgttaactgttttaagtcacaggcaggaaggccctgccgattcccttcctttacagaaggagaaactgaggacaagtgacttggctaaggttgcatagcaggtcagtggcagagctagctggtaccagaaccacatctcctggcttcttctccagagccttgttagcctcactgtgctaggaggaggggggctagtgctctggcttttatgcatatgcagctccctaaagtcaaagacctttgcatttccctccagcagaatcagaaagtctggtaaatgggaaccacaccccacagactgcaacacggggaccctctgcctgtgccagccacagttccctggtgagctctattgagaaggacctgcaagagatcatggactcactggtgctagaggagcctggagctgctggcaagaagcctgccgcaacctctccactgtcaccgatggctaatggtgggcgctacctgctgtctcccccaaccagccccggcgccatgtctgtgggctccagctatgagaacacctctccagccttctctccactctcttcaccagccagcagtggaagctgtgccagtcactcacccagtgggcaagagccaggaccttctgtgcccccgctggtacctgcccgttcctccagctaccatctggccctacagcccccacagtcccgcccaagtggtgctcgctccgagagtcctcggctgagcaggaaagggggccatgagaggcctcccagccctggcctccggggtctgctgacagacagccctgcagctactgtcttggcggaggcccggagagccactgagagcccccggctgggtgggcagctgcctgtggtggccatcagcctgagtgaatacccagcttctggtgctctcagtcaacccaccagcattcctggcagccccaagtttcagcctccagtccctgctccccgaaacaagattggcacactccaggaccgccctcccagccctttccgtgagcctccaggcagtgagcgggtgctaacaaccagcccctcacgccaactggtgggccgaacattttcagatgggttagccacccgtaccctgcagcctcctgagagtccccgcctgggccggcggggcctggacagtatgcgagaactaccccccttaagtccatctctgtcccggcgagctctctccccgctgcccacccggaccaccccagatcccaagctaaacagggaagtggcagagagtcctcggccccggcgctgggcagcccatggggcttcaccagaggacttctccctgacgctgggggcacggggccgtaggacacggagcccctcacccacactgggtgagtctctggcaccccacaagggcagcttcagtggcaggctgagcccagcctacagtctgggctctcttactggggcttcaccctgccagagtccctgtgtccagaggaagctctccagcggggacttgcgggtgcctgtcacaagggagcggaaaaatagcatcacagagatcagtgacaatgaggacgacctcctggagtaccaccggcgacagcgccaagagcggctccgggagcaggagatggagaggctggtgagcgggtgccagggaggcttgccactgtccatggcagagtctctgccagggctcgagcaggccagctggcagagcaggagaggccctcaaacagggcttcggcttctcaaggttccccacctccaggatacactttagtgatcaatatcttatggttctggtgccgtgaagaagaaattcctttgaaatctctaagactttattttaaattcttgctaattttgcatttattcaacatagcatttgttttaatgttaaattaaatttcacattgtttacctgagcacagtgaagctctaggaaaacataccacaggtatggtaagacctcgaacctcccagtttgagaagcagttggtgatcatgagtaggctgaagctcagagaggggaatggctttgtccaaggtcacacagcaagttctggcagagctagaattggaacccaggtcccctgtctgactctttctgagacttgttctttagaaaagtaccttgtccttcttttttgcttgtctttggcctctacaagtgggtgggagctgctcatcctggcccaggcagtatcatctaggagtgcaggtggcagggtagagggacagagcaggataggcaaccctggcctgaccgttagccagcctgtgtaattgtgactgtgtgtgtccatgtgcatgcacgtgggtgcatgcaggggctgggtgtggctctaggcagctgtcctggagatggcatctgagctgggtgggggccaggattccccagatagctcagggagcttaaggggctctggctggtgtgtacacagtcgagcccatgtacagaagaatggattctgccctctgtcccttacgagcagaacagggttctttggaaggtgggcaggaaccctgggattggtttgaggaagagaaccagaactgatgagaaccagaactgaagcatctggagatgcttttggaagaggttgggacagttttggatgagggtataggattgtgtgtttgtgttggatgggggtgagatgaggcggatcccatcttttcctttgctgcatcttctcttcactgtttttgcattggtctagacgggaatgcatggccattctaagctggggtctcatcctggagagggggcagtgagcctggcacaggcagagtggcaggcacagcctcccccaactcctccatcagttttcccacccccattcccacacataagcacacatcttaccactagtcctgacctgcctcacctgccactttaagtcttggaggctgcccgccctgcccctcccacctcaaccaggctgcttatctgggtcctggggcaggggtggaggcactggcccagcctcccaggtgccgaggctctgttccggttttttttttttttttttgccatggaactgggcaagcaacaggagggaagctgggtaagtgtatgagaacacctctccagccttctctccacttcctgcggtttgggttcatggccaaactgtaagtgatgagagacacttgaggaggtctagggaccctagagagccatggaagcctcacaaaccaggcttcaggcctataggtaggcctgcgggaaaaggcaacaaagaccaggaatgtgattgtgtcatccctcctttacctcctaggcccctgagaggtgactgtatctgggtgggtgtgtatgtggagaggggtggatgaagtggtagggccatgggagtactcactcatgggcctgggcattcaaggactggcagcagcccatcctgctgataaacagccaagggctgcctgagggtaacttggagctgaggtggggacaaagagggccgtgtccttggtctacctcttctccatgtatgtctgtggttgggtgtctggtccctgtgggctcatgggtctgttttccagcactgtctgtctgcatacatgcccacctgtctgtatgctagactgtgtttatctgtgagtgtgcatcagtgtgcatttgtgcatgtcagggctggtgtctctgtacttgcctattaatgcagggccagggcacatgttgtatccttgtgtgcctgtgcatcagtgctggtgtgtcagtatgtgtccttgtgtctgtagatctgtgtgtacctgcgtcaggacgagcaactgagtttatctgtgtctcattgtggtctgtagtctgcttaacagtgtgtttctgtatgtgtttagtgtgttactgtgggtccatttggtgtgttcctgtgtgtcctggggtagactgaaaaaagaaaggaacaggaagatggaaggggctgtcccagaagtgggcaggaagaaccaggctgttatgccatgtgggcatgtggcacaacagcctcgttcttcctgcccacttctggggcaccttgtttccctctgcctcccctaggtcttggggtcaggcctctcctgacttgacactgatgtcctagccccctgtaaccctgctctccctcctgacaggatactgaacctggctctatccccaccagggctcagcttcctccccttcatgtcctgctctgtccatcctccccaggaacgccagcgcctggagaccatcctgaacctgtgtgccgaatacagccgggctgatgggggacctgaggctggggagcttcccagcattggggaggccaccgcagcattggcactggcaggccggaggccctcacgaggccttgcaggggcctctgggcggagcagcgaggagcctggcgttgccacccaacgcctatgggagagtatggagcgctcagatgaggaaaatctcaaggaggagtgcagcagcactgagagcacccagcaggaggtgagatggaggggtaggcaagacaaagaggctgaagttggacctgctgggggcagaggaggctggtgtatccaatgccaaggtccagtgaggggaaggatcaagtttgggaagagattagagagcagaggtgcagaaatgagacaaggaagagaagggaggtgttgatgagcttcccaagctgtaaatatgctttatgacctgcctttccatggggccccacccaggcctggcactcagtggtaaatattctcttccgcagagcccttattgctcccctcaaaggtgggggttgcgggggggcagggaattagcctcctgtctcagtccagctattcctcagcaagtgcctggaggaacaggtgatccattttcttagtctgattccaaaaggctctaggcttcctcagttgatagcttccctcccctccagcacgaagatgcacctagcaccaagctccagggagaggtgctagccctggaagaagagcgggctcaggtgctggggcacgtggagcagctcaaggtccgtgtgaaggagctagagcagcagctgcaggagtcagcccgagaggtgagccgtgaagtccctagctggactcttccctaggccaactgaaggccccagagaggggccacagtcagctgctttgatggggaccctggtgtctgcccccaggccgaaatggagcgggcactgctgcagggagagagggaggcagagcgggcactgctgcagaaggagcagaaggcagtggatcagctgcaggagaagctggtggccttggagacaggcatccagaaggagagggacaaggtaacccacacctggcccagcttagtgctgggtaccagtggcctgggagagaaggagaaatgtcttctctggggccctgtacccttcacctcatcatccattctgcagtacaagtggtctctgtggctttccagagacagagtgacttctcctcctctgtggaaggaaccagcttggagggcactgccaggggctgggctggtgtctggggtctcctctgtctgggtctgtgtgctacctctgggtgcctgccatcctaggccctttatggcccttctaggaagtgccaaagccccttcttgggcagtgagcacagcccaagggactgacattggggagtgattcaagttcgggtcccaccatctggagaacatctccctccaagcatgccacaagtgcttacgttgtgatctttgggagatggccctcgggcctctgcttcccttgagccttcaggatctgcagcctcccatcccaggtgatcctagctcctgcccctgcccctttcagatttcgtgccagcctgcaggggccactcccagatgcccaacaccgtgccaaaagctctgaagtggagaggggtcatctatttctggatctgacagtatttttccaataatttaattttccttctggattttttgagtttcttcctcctgccctcaattttgagaatcttaaaaattctttgaccctttttttttttttttggagctttggctctggcccccaaaaccacactcccaaattctgtgccaaattaactccacgcttgccaactaggcctacactaacgtcccttctaatcactgacttgggctttccgcatgcccctaactgccagtgccacccaggtagggctgagccatgcccgcttttgcactaactcagtgggtgcctctgtgcccctggcctctctcctctaatgctgcctccttcttttcttggtgtgggaccccagagtttttatatgaaaggaattggcaggaggattggtagctcaactttactcaagggggcattggcaggaggggtatgagggtgggggaaatgcttggctgtggagctgctcagactgaagagttctttccattggaaatgcctaggctgctgtcttaggctactgtctgaggacagcatgagataacccaaggaagcttcctggcagcttcctgcacagcagagtaggctgtcttccacctattcccctgcctgccctctggagccaaggagtaaggaggcccagttgtgggcgtggtcttggagggcttgaacaggacctctctgccaacatagtggctacccttcctagctttcccttggggcttcccaaattcagatacccatcagaggttggtaatgggtagcccctactcttctcctcactcctgagccacctataacacagggtattttaaaggctgagtccaaggatgaggaagcacctagaccccaggaactggcctgattaggtcctcctctctggggatgggtagatgagttgggtagagggatgggagtgactgggttcagcatagggcctcactcccagggataaagctcagcatttcagaaggaacctgcctaacctcatttcccactgacctggagttttttggaggcctagacttcgctttctctgtggggaagagaggttattcgaggctgtggtagtgatggtggtggtggtgatggtggtagtgatggcaatggtgtggagggttcacttggcttccctcccctgccctcagcccatggctccactctggctttggaatcagtaaccacagtttctcctctgcctgtcctttgaggggtgactcaccaaaccctcccctcgtcccccttcccaccctcagaggtgtcatctcaccccagaaagaaccgtccaccccctctgtacccactcctgggactcattaccatggaaacagcccgaactaattgcaaccctcatccctgaagttcagcctgcagggccaacaccccaccccgaccctgggcaggaggggagggaggccaagggtgttgggttggggtcccctctgccacactgctttaacatcctcagctcctgattgacgcccaaccctggatttaaccctcaccatcactaccctttttccctgggttaaattttggtctctgggctgtagtagaaggggagggatgagagctggaggctctgtgatgcagaaccagccttgactggtttggagagaaaacagagggccttttctcgagacctacccaacaatttcagttcaagggacttcaggagaccaaaatctgtgccctgcccccacacctctgcctgtgttacctcatcccctgcacctctgactgccgtgttaccttcagctcctggccttgggccctctccctcttcacctctttccctcctcactttccctttctgcccttttctttctcctcgcctggttattctcctctttgattctagcctttttttctcctctctcaacccccattgccgacccccattctgtcccgccctggccgccctcccgcgctcccctcccgccgctgccgggccggagttgaggagtgtgtgttctgtttctcccctgtgccccgccctctccctcgccctcccgccgaccaggagagggcggagctggccgcgggacggaggcacctggaggcccgccaggcgctctacgccgagctccagacgcagctcgataactgccccgagtcagtgcgggaacagttacaggagcagctgagaagggtcagttccaccgccccccctcccccggccccgcgggccacgccccagaaggaagagaggagagcggtgggacgggaccacctggcctctgcagtacctgccggacaccagggtcggtgctgcggtttggagggaaccgggaaggttggggaatcagcgctccaggccatgatgcccgcaaaagggcaaggccaagtacagcgggagctggggggaggcaggtttcttacccaatttccccgggtccagccccatacaacgcatgcccctgtggcctggtcttccaggcccagagtggcattgcaagcaccacccaaccccctttgtcactgtcgttgaaggaggcagaggccctggagactgagacaaagctctttgaggacttggagttccagcagttggagcgggagagccgcgtggaggaggagcgcgagctggccggccaggggctgctccggagcaaggctgagctgctccgcagcatcgccaagaggaaggtgtgccccacctcgttccctgctgcgtgctgttggaggccagtgacctgggtttgaatcccaatgacctcacaaaagttaacttcgtcttttgtgcctggatttccttgtctgtaaaatgagaattacaacaggttgttgtgagaattaaacaagatgtaaagacagaataggatgtgattgtaatgagcactcggtgaagaataactattattaagctctgactcccctcagtcttccagtggaaagtggattctgctcccattcagagcttggcactggcccagcaggaaggtgaaagatggaggaggaggaggcttgcccctgtgcttgcagagctcttgtctggtggaagtgctgggacacacagaaagatttgagatctggatattagagccagctaggggccctagaaagggcattcatttcggttccagccatggctcagccctgccttggctgagctataaaacaagggttattgggtattgtggcctggccagctgtgacacgctagctagatactgtgatcacctgctcttgatctcagccagaccacaggatggtggcacaggtgactgtgtatgtttggggagtaaagctgggaggaggtatgtgttagtaagggttgggaagaggtgagggagggattggagaggatggctcaagcagcttccacccttatggctgaagcttgtggccatgcacatgcacacatgcatgtacattttgcttggctggagttagtgtgggggaagtgagggtggtgagattggggaggggtgtctaaaattggtgacgtaggggatttgctggttagcctggggttggtggtaagtggggagctgctggactttccttgagtccagatcccatgcttctctccctgagctgctgtcttacaaacgcactttctggatgtaagactgactgatgaaaggagggaagaaaattgacacacctaagcacatgggtgtgtgtcaggcaccttgctgggagccttccttggattacctcaatgctgtccttaggacggtatcacaagacaagtgctgttattcccattttatagacaaggaaactaggagtaggagaagctacacattttgcccaaagcctcccattatataagcttcagagtcagaattggaacccaggcctgttggcccaaatcccacgttccttcgactgtactgcactgaggctaggggcgggcacttctctagcctcttcctctttctttctggagggaatgcggtagggagctgtagatcagctaatctcatccctttggggttctggtgagtataagctccagggagtttgggagggcttggcagtagtggattcctcttcccacacccaccctgcctcctgggaaaccggagctcagcccctaggacctggggtgtcacattcttccccatgctcctccttaggaaccttatccagctttcatcctcagaccctagtgtcccaccctaggctctgtctgccctggtgccctgtgctcccctgccctttccactctgattcagagtgactcagagtactggtctgggagtccaatagatgattctaatccgtgctctaccacttagctggctaagagatcttagctcctaaatatgttggtgttctcacctataaaatgggtataaatgcacctgcctcataaaggagcttattaaattacgtaacaaatgcaaaacatttagcagagttcctggctcctaatgggttcttagtagatggcagctcttgcggtgaggattactgcctagcctactttgttgttgttgttgattttgagacagagtctcgctgttgtcgcccaggctgggttgcaatggtgtgatctcacctcactgcaacctccacctcccaggttcaagcgattctcctgcctcagcctctcaagtagctgggattacaggtgcccccccaaccccacacctggctaatttttgtatttttggaagaggtgggatttcactctgttggccaggctggtctcaaactcctaacctcaggtgatccagcctcctcagcctcccaaagtgctaagattacaggcatgagccacagcgcccggccagcctactttggtcttttcttggactgaccccaaatttaggacatctcccttctttaactcttcctttcccatgatttgttcctaaagatggtggtttaaggccgccttcttcaggaagccctcctgggattaacccagcccatttttcccatctctcatccttcccccttacttactatcttttcatttccttttagcacatgattgttgagccaggtactgttctaaaagccctattgggggtataaagacagaaaagacaatgtggatcttacgtttggggcaggctggtggtggtggtaacagatatattcacaaataacaataataaaggcagatggtgatacagaagaatgtgagcacagaggaaggagcaaagaaatcggcaatcaaggaaggctttggagaggagatagcatttggtctagtcttagatgataagtaagctcttgataggtagagaagattggaacagctctcctggcctaaggaagcgacataagaaaggcctgagagtttacagctacacagctgagtgtacagtgtggctgagctgaaaggacatggaggctgtaagagggaggggagctgcaaagggttcgggagccccgaatgcctggtaaggagtttgtgctttatcctgtgtgtaatgaggagccactgaaagattttgaggagaggcatgatctgaccttacttgtggatttttaaaaaattattcaagtaatattcctttttagaaagtaatttttctttttagaaagattagaaaattcagataagcaaacaaacctcaaagtcatcttaggaagatatttgtgacagtgtggagtggatcaggaagttgagagagtggaagcaaaggctggtgagaaggtccagaccagggaagcagagggcctggatttgggtggtggcaagtggggttgggacagggagaatgaggcagatggagtgtctctaggctttgggacccattggttgtagggtaagggaagggagatttgaggatctgagtggtgtgcctaatggcacaggggtcattggtcaagggagggagggaggcccgagggaaggagcccacatggcagcctgttttcttagggtgagttgaggccaagcagaagagctggttgatccccttcacctgagccttgagtgtctgggcaggagagccagctagttctcaccttgggctcagccctgtctccccagggcctgatcaaccaccccatctcctttaggagcgcctggccatcctggacagtcaggctgggcagatccgggctcaggccgtgcaggaatcagaacgcctggcccgggacaagaatgcctccttacagctgctgcaaaaggtagggtccctgaggttgggccgggagatttggagtagggtaagtgggaggggagtgcagaaggactggggtgtaaatgtgctggggtggagcacagggcccccctcacacagtctcctggctcccactcctctttgactctgccattctgggctcgcaggagaaggagaagctgactgtgctggaaaggagataccactcactcacagggggcaggcctttcccgaagaccacatcgaccctcaaagaggtatcatgattggattagccccagcttcaggcccaaggcgtgtcctgggaggctctgagtaacacatggcactttcaccccagtagctgaggttgtgtgggggcatcttcctgaatgggagagatttgaggaggaatggccccaagctctgggatttgattttccatggctgccagctgcctctgtttagttgcctctggggttcccaggagcctacagatttcactgtttttggtggctgaatatatgtggggggactcaggggcctgggttgggtgggtagacagctcagaggcttggtaggggccgggctggatggactcaccttgaaggggagcatagggatataggggtgctgatcctggggctcttgggcttcagtcctgagttaggcatttgtctcagaagaggatattgaggccccttaagtggttcttccccaagtctgtatgtctggtgtgtgaattccaaatagaacatatctggtttaccaacttcgttccctccctccctccctccctgcctcactacacaaacaatttaggcctgcggtggggaactgggccaagtgtgagggatgcagcccctcaccatgtcccctctctgtaggccgagctgctcatctccgagtcctcagagatggggctggggactaaggctctgggccttttcccagggtcttctcaggctggggcctcctctgtctctttaaccccacctgcttccactcttctctgccccaaagcacaagaggtaatcacagctaactgcgtgctctgctttgcccactgcctgtctgcctgcccgctgagcccctgcctacagctcctcccagggcttagctgaagggcatgtggtgatagtttcttggctggccagagtttgggagagtgtgtgcgagcatgccatgccgccattccatagagtgcctgtgcagcccattgaattgcatatttatttgccatgcagaatataattctgcatgccattcattagttctcacaacatgctggaccctctgactgactttccttttccatgaccccagaggacaacctggttctagagctaggcctggatgggccccttgggtagagcaggcttatgatcctgcgctttgattcagcatgcattgtggaggtctaccatgctcccagcacccagataagctcagtttctaaggacaggtgatgaatacgacagtccctatcctcccgacccacagttgaatgtgttggcatctttccaaggactcaccttgggcagtgggcccatttttctgctaggcttttagctgttcttgctaaggcctctttctcacagcccatcttgctcaggccctggtgatgtctccaccttcccccacctgtttctagctcctgtccaggctgatggggtgtgaggggaccctggggaatggtgtgactggtgctcaatgctgcatgtgtgtgccccactggggactgccaggttgttggggacggggagggggtctctggaagctgggttctgatcctcagtgaactcttagaaggccttctgtgggcttctttgcctgcccccagcccagggcgaattcaggcatgggccttcagggtctgcttggggcaggactggatgccaaagtggctctttaagagtggagggcaggaggagccttcagacagttggttctgctgcccttttctggtctctgtcactccctgcagccatctatgggcatagcaggcaccctacccctgccttggattttgtattgacatggagtgatggccctgtggcctggcatggagtttggggtgttgggcaccttattgaaccctgttaaccccttctttgcccacccctaccccttctactgggcaccccaggaatatgtgaccctggcagaagttttccagctgtgttcccgcttggacccctatgcttctgccacttcccccagtgtgctcgcccagcccctgcctgacagtgaggtaccagccaccgagggtgcccaccaatgcccaaggacctctttatggatggcctagattcccccttgggcctgggtggagctagggggacagaagggtctgtgttcgacagtgagggagaagggcagcctgcataaggggaggttgggagtggtttctttttttccctggggccttgggagctttctttagctcctatggcctggggaggggcacgccttctgctctaggatgagggtgtcgagttgagaggactctggctttcctaggctgcaggctctgtactttctgccctttccctcccttcccctgtgggtagggccatctcatgtgttctggttccattaacctcttatattccctcctgcgtctggccttgctccaagtacgtgatgcttgagcagctaaaggtgatgcggggcacctcgcccatgcccccagcccctgtgccaggcctttctccctgggcctccgcctcccgggacctggttcccaccacctgccttcctcccatgctgccctcctcctcgttcgcttccatcacgccttcacctaaggttggtggtttgtgagttcttgctacccccacccatgactggtgtgctctgtgtgtgttttgctcctgctcacctggcctcttggctctgggccagcccaaggggagtgcccagtgcctgcaggctctgtctggtggctggtttcatggctggtgtagcacatgtctgtggtctggaagttgtaccctgactgtttctctttgcccttagtacattcagggcaactgttgtctcactgtttttctcttctttttcttgatgctctcctttctcccttccttcctccccttcttccttcaccttcctgtccatttccctgatgtggccttcctttttaaccttccccttccttcttcctcttctttcttctttctcccttctcctgccttttcctttccctttatttcctggcctttcctctccatcctcccctcctgtccccttttcccctccccattcccacctccagatggagaagctgctgctccctgctgtagacttagagcagtggtaccaggagctgatggccgggctggggactggccccgctgcagcctcccctcactcttctcccccgcctctgcccgccaaagcttcccgtcagctgcaggtaacccctccttcactgcccgtcctccccagcctttgcacctgtccactctgatacctcctgccaatccatcagccacacagtaccaccttgagtggaggcgtcagcccagtcagggcaatgagggcacctctgggccctgagagggtcactccttgggcagccatcctggcatgtgggcaaccggggggccagcctccatagtctaaaactatctgattgagtgtctggtggaagaggattctggagctgtggtcagtttgggatctgtttggtgccctgtgctgagctaggctgtgggtctggcctatgcttggcagcccccaacacctggagcttctcacccagtctgggggcctgacaggctcttgggcctgtggcaactggaactagtgtgtcctgggaagaactgccagtattttgttctcctggtctctccagcagtgacacttggaagcagaaaacaaagggcaaagactctgaagtgacagcctaagcctcctcagagttgccatggagggcgtgggcctacctgaacctgcagcaagcaactgaccatggggtgggaaagggggctgggctagtcttctcctcaggtttcctccactgaccagctgcagtgcctaagattgaccatttaagatcaccccttgagtgaaggcactgcatctgtaagactgtgacctcagctaaaatttcatgtttccttggggaggagtttgatcatgtaagacttctactgtgtacccagctggttagagattttaacgtgttttgattctctgatcatcatcataggcctttgaggtagatgaagttaactcattttatagatgaaacactggggcctagagaagataagtaatctctccaaggccacacagctaggaagtagcagagcttatgccacgtcagggtttgtgacactaaaggccatattcaccacatgctagtgctgcaggggagcttggccattatttagtctagtcctacccccttcttttgcagataaggaagccaaggcccagagtagggaggtgtgtggcccaaggtcacacagcctgttagtggcagagctaggaccagagggaacccagcttctagttggtctcctgcacaactgcctgactgacattaaatccttgcatgggtctgtttacaggtcttttcttagacccagggttgggctagggattggcccagggaggaacagcctggaaaggagaattggcagctgccaatagcatctggccattgggctggctcaggaggcttgttgtcagagccagaaggcctcagaggcctagtgccagggcggtacgtcagatcacagcagactaggtgacatgggggaggtggccaatgggggagccaggaatcactgggcactatcttttctttccaggtttaccgctccaagatggatggcgaggccaccagcccccttccccggacccgcagcggccccctcccctcctcctctggctcttcctcctcctcctcccagctcagcgtggctaccctggggcgtagcccctccccaaaggtctgaggacagtgggtggggctgcacatgtggctggggatggagacttccaccctggggagaggccaagaccttgggaatgggggtaagggccttctgagcccaggtccgaactctccattcctctgcagagcgctctactcacccagaatggcacgggcagccttcctcgcaacctggcagccacactgcaggacatcgagaccaagcgccaactagctctgcagcagaagggtgagtgactgccccgccagcccacctgctctcctgaggggaccctgggtagttgccatgcctcctctatgctcacacctttcacaggatgtttttcctttaattgggatctaggcaagaccagaaaggatttagagtgggtacctaaagaagagcttcctggatatttatctaaagccttcagggcaggagactaagggcttagggggctgtgacatctttcctagagagcctagccaataagggaactgcttgttgacctgagtcgggttagacattgccctctctggagggaggggatggatttgatgacttctagaaatggttgcctgagatattggctctggggacccaggagtccttgttgcttgtgtgcaatttggttgttttgaaagcccatgtctgtgcctctctctcctcttaccccctctgtgtctctaccgtaccctctgcctggggtcccccacgccagtcgagtcgcttcccgccgagcccctcccaaccgacgacccagcaggtagaacgttggtcatagagggcattgctttggccaggcagcccctgccctggcatcagcatgatgtgtcctgcccaggtccccactgcctgcaggcagggtcccaggctgagctgggttggggtgtctgctggcctcacccctccagctggcctctcttctgccctcatctgtgctctaccgtgtctcccctgccttctttcttgcgtttgttgcttttgcttctgcattgcaggggggtctgcattggcagtctgggtgctcatggggtttctgccatctcttccttctcccttctccagcaggcagggtgggtgcatgtatcctgcctagacctacttaggccttggttgtgagctggagccaactggctgtcgtgctgccccagcactacttgggtaggtttggtgtcctatatggactcagggtgcgaaagagcactgaagccagactgtgcatctgtggccggttgtgcaggcgactgaagcattggcagagcagccaggcctggagctgcaggggccttagggaagctgcggggagagggggctgctctgtgttaacctctccctgcttgcccctccctctgtgtgttgtgctgccagtggcctgctccttagctgcgtggggagcccactgtgactcccatctgtctctccttcaggacaacaagtgattgaagagcagcggcggcgactggctgagctgaagcagaaagcggcagctgaggcacagtgccagtgggatgcccttcacggggcagcacccttcccagcgggcccctcgggcttcccccctctcatgcaccactctatcctacaccacctgcctgcggggcgggagcgtggggaggagggtgagcacgcctatgatacgctgagtctggagagctctgacagcatggagaccagcatctccaccgggggcaactcggcctgctcccctgacaacatgtccaggtacacccgacgcctgggcccgcagcctccctcagccaccgcctcagctccttgatgcacttcctcttccccttctctccccagcgcgagtggtctggacatggggaagatcgaggagatggagaagatgctgaaagaggctcatgcagagaagaaccggctcatggagtcgagggtgagtctgacctggatcggggaggcagaaggtgttggggcacagagctacctactgcatgtcaagggcctgtgctccaccccaagcccttccacccacattagccttgccacattcccttggggtagaaaatgttttaaaaggttgtattctggccgggcgcggtggctcatgcccgtaatcccagcacttcaggtggccgaggcaggcggatcacgaggtcaggagatcgaaaccatcctggctaacacggtgaaaccccgtctctactgaaaatacaaaaaattagctgggcgtggtggcaggcgcctgtagtcccagctgcgcgggaggctgaggcaggagaatggcgtgaacccgggaggcggaggttgcagtaagccgagatcgcaccactgcactccagcctgggagacagagcgagactccgtctcaaaaaaaaaaaaaaaaaaaaaaaaaaaggttgtattcctcaaacaggcttagggaggcttggtttgattacaacttcatagctcttaggaacagagaaggcagcatagtaaccattctctaaccaataatttcctgtatggaaacttccagtttttgcatgtttacttctgtagactttttggcaactacaggaattttgattcctgtctacccgtatggcaggccattcctcttggggctgattaggaaaagcaggaactatgagtgaagtatagaccagaagaggaggcagatgtccaagtcagtgtagaggtgttggcaggggaaccttgggagcagagagggctgacagctccttcacttgggcacggagctgggattcagcaaagagggacccatggtttatcctgggcataggcaggctgatgaaatgtgtgcctaggaaggaggataaataaaggatctgcagaagctgttctgtgtccaccattggaggcactctgcatatttgagatgagagtgggacgcagagagtaaggtcagcagtttgagggatttaataaaaaacagatactgacagtctgaatggaggaccagccagaaaagaatgcctcctatcttatttatgtctgaatatggcaaatgtataagcatctcctggcaaatgtggggaaaggagattctgctaagttttgagctgggaagaaatagtaaatgggagttaatggtataggaggtctttattagtaattaagacatataaagcatcactgacatgctctgtatttaattatttgttttaatgacttctaaaatccttttatagtggcttttataagttcagttctgaccttagtctctagtcacttttttcccataaagtttgaagttcaatagcaaatgtttctaatttgaagtttcagaaggccttcagttagtgattgggaaaggactatatattagctgtcaaaaaaagttgtctagataacccatgttgcgaggattcagatacaattgtaagagccccatttattttttgagtgctttccaactggaatcagtgatgggcatttatctacatgatctaatttcattttcactataattccaggaatgggcattcttaacttcatttcacagatgaggcaactgaggcttaaaaagtttaaatggctgggtgcgatgactcacgcctgtaattccagcactttgggaggccgaggcaggcggatcgcctgaggtcaggagttcaagactagcctggccaacctggtgaaaccctgtctactaaaaatacaaaaaagttagctgggcatggtggcaggcacctgtaatcccagctacttgggaggctgaggcaggagaatcacttgaacctgggaggcgaaggttgcagtgagcgagataaaaaaaaaagtttaaatgattttatcaggatcacagagcccatagtggtagcggggccagggtttgaagtcaggacagtcatgcttaaagcatttctctttaaccagccagggctcttggagagggtgggctttgaagatgatgcctcctcatgccagactaccctgaggtggattcctcctgcagccctgcccaggtgtgaagagggccagtggggggaagaggatggccataggtgctgaccccttggctttgggggcaggagcgggagatggagctgcggcggcaggccctggaggaggagcggcggaggcgtgagcaggtagaacggaggctgcagagtgagagtgcccggaggcagcagctggtcgagaaggaggtcaagatgcgggagaaacaattttcccaggtgaatgggcagtggggcacagtggtggttggtttgacggtgagggctgtagagaagtggggagatcccagggtttctgtgttgggctgtaaaacctgttctactccagaaaagattgctgttggcttaatactagcagaattctacctgggactcattgaccccaaaacagacccaccaggactattcaagttgtgtgtgtgtgtgtgtgtgtgtgtgtgtgtgtgtgtgtgtgtgtgtgtgtgtgtttgtgtgctggggtagtgggttgtaaggatgtggcaggccaccttgcagacatccggggtcagagaagagggtctggacaggcatcccagagatgggagctggtagtcaagaatcagagtggctccccttggcctctctccagggcctcagatccgcttcatgagcctgcgctgcaccttcccgtctgcttcccctgctgcccctcctgcatgtggaacttcagggtgtgctggcccacaccccacaggacctttcagctccagtccccaccatcagtggatgacctcactctgacttttggtttacatctccaagacagaattgtactagtttctcttcgggacagaaatccttccttgcccaaaagccagccctaccctttctccttaaacaggagacttgagcagaacaattgaaagcagaaggagaaattggtttgggctgggaaatctgcccatgtctctggtcccaaatcctaactcccacaaccccccatgagaatctgtaggacttagatagcctgtcccttctgattagtaggcttccccaggttgggagtcccctggaatctttcccaagcagtgatcacagttccctcatttcctacagtgcaacaaaataaatcctaagggataggtcatctggattgggtttgggaaataatgagaaggggctgggcacagtggctcacgtctgtaatcccagcactttgggaggccgaggtacacagatcacttgagtccaggagttcagagaccagcctggccaacatggcaaaaccccatctctacaaaaaatacaaaaattagctgggcgtggtttcacacacctgtaatcctagcttactctgatggctgaggcatgagaatcgcttgaatccaggaggtggaggttgcagtgagccgagatcatgccactgcactccagtctggatgatggagtgaaattctgtctcaggaaaaaaaaaaaagaaaaaagaagctctgtgaattttacccccgtggttggaatatttgtaaaatgcttggcttccctttcctgcttcagtcagtgactgttctgggagtctctcttctagcccctgtcctggggctcaggcattgctgcagtggccactggtgtctggtgtgggagatgggtagaatcagctatctgtggggtcgtgtgttttgtttttttctttaaataatatatgatgtttcctggccattttaatgttcttctgggacaggaagagtagaaaaatattccggttgactgagaattctagttagtatcagaggtagagtagaccttagtaattatctagttcaaagccggcgttttacatggaaggaaactgaggcccagagaagggatgtgacccaaacaaggtcccatgcgaagtcagaaactagatttcttattgggcttttcttcccagaccacgttcatatctggcctcttgctgtattctctttggctcaggagggaaaggaggggcagggcaagacaaagatgccgtgtcttggtcataggtgggaaaactgaggcacagagtgacttcgcagtttgcccggccctaggtagagtcaacataggcatggtaggtctccacttttgccataagccctgtggagccacagtgaccgccatgggttagggaggtgtgatgtcaggctgttggggtttagaagtgaagccaaggggcctggacaggggaataatgagggaagagaggagactctcctgaccctccctcttgctcccaggcacgacccctgacccgctacctgccaatccggaaggaggactttgacctgaagacacatattgagtcatcgggccatggtgttgatacctgcctgcacgtggtgctcagcagcaaggtacaaggcgtgtgtggccctggggtgctggggagagggagaatcccgtggtgagaggcacctcctgggtcgttggaatagtggcgtcagtctctaccctcacctaaccagatctctgtcccaggacctggtgtgctggcctgaggagatgttggggacaatcccccatgaatacaggcacaggcgatggcacacacttaaggcttaagggctgcatatttgggtccttccttactcctgcttcctaccaggtctgccgtggctacttggtcaagatgggcggcaagattaaatcatggaagaagcgctggtttgtcttcgaccggctcaagcgcaccctttcctattatgtgggtgagttcccacaaggccaccctgggggccagccaggatccctgggctctgttacccaggacggctggtcttctagaaggaggccaagcttccaagtaggggaccagagtcttgggctaggctttgccctccttccctgaaaatgtacacaatgtacctggttcacctccatttttgtgttcattcattcattccttcattcagcaatgttactaagcatctagtaagttctaggcactgttctaggctctggtgatgagtaagatggccacagcgctctcatggagcttataatcagggaagcagacaagagtgataaccacgcacaatgggtatgctgataggagacatccaggcactgcaggagcatggggtcttatggtcagagttgggctgggaactcccccttggacaaattccatcagagattccaagacaagcagttgaacagtgccaaagagtgctcaggatagcccaggaacaggccgactagaccctcttgctctctcagctctctccgttccagcatctagcctagtttcccatccctggaactcccttgtacttttcccacttggagcgtgggatgctgtgttataccctagtcaggaggaggtaaggtatgctgcagtaacaagaagtcataaaatcccagtggctggacaggtgcagtggctcacacctgtgatcccaaaactttgggaggccaaggtgggcagatagcttgaggctaagagattgagaccagcctgggcaacatggtgaaactttgtctctactaaaaatacaaaaattagctgggcgtggtggcatgcacctgtagtcccagctactcgggaggctgagcacgagaattgcttgaacccaagagacagaggttgcagtgagccgagactgcgccactgcactccagcctggacaacagcgtgagactctgtctcaaaaaaataaattaaaaggccgggcatggtgtctcatgcctgtaatcccagcacttttgagaggccgaagcgggcagatcacgaggtcaagagattgagaccatcctggccaacgtggtgaaaccccgtctctactaaaaatacaaaaattagctgggcatggtggcacgcgcctgtagtcccagctactcgggaggctgaggcaggagaattgcttaaacccaggaggcagaggttactgtgagctgagatcgtgccactgcactctagcctggcgatagagcaagacgccgtctcaaaaaaaaaaaaaaaaggaaatctcagtggcttacaagtactaggcttccttatgcccaatacatgtcgactgcacattgtgagttggtgggggctttgctgtgcatcagcgttgtctttgcttcagcatggcttttgggaacatttctggccacagtggcagagggaaagagaggcttaagtgagcccggccttggtattaaatgtcctagttgggaagtgacacacatcatttctgtccagaagtcatagatggggctgtctgccagtcacacagcctcacctagccacacagctgggaagagcaatcctgctaggagctcagaagaggggaaagggctgcagagtttggtgccagagatgctcaggtctggagtgcccacttcccccctaacctggtccctgatcacctgctggcccctctaagaaaccttccctgaccaccctgggtcttgggtgttttgaggaggcaggaggaccagaagcacaggtgtcccatgtttctctctgggccaggaaggtagagggactagggactttggagaggaagaaacatgcctggggaaaggagttccattttaggcatgttgagattgaagtgcctctgggacatctaggtttaggaggatggtcaggattagaggtggagtaatagttgaatcaggtggaataatagtaatagcagatcacctttatcaagcacttgcatgagccaggcgctgtgctaagcactctgcatgcatcatctcattaatctttgaaataatcctatgagggaaacactatttttatgccattttaccgatgaggaaaatgatgctcagagaggttaagtaaattgcccaaggtcccacagctcctaagagacagagataagactgaacctgggcagtcagactgcagagcagagaagaggggagggagagggccgaaccctggggcaggcctacccgtgtggggaaggagaaagaggagagaccagcagagggagaaggggcaggagacaggaagccagcactaaccacatgccaggtgctgggctggtgcttggcatatgtggccttagttagcgcctgtggaacaaaaggagactaagttcagatggcaggaatagaaatgggagcagaaacagggaaggaagccagccaaaggagcagacattcacaagcaggaggtgtcaccagcagtgatggatgctgcaggaaggccaagaaagatgtggcccaaaggctgttagactcagggatgggagcttgtcaagagaaggctttctgctgtgcatggggccaggagccagactgcacaagattgaggataggtgggtggtaaggaagcggaggcaggagtgtgttactatttcctgtgaaggaagggatgggagagaacaggagctggagggctgagcaggcccagagccaggcagggctggtcctttaccaaggaggaaatgtcagaaatgggcctgtggctggataagggccatgggtgccttgcctattccgcttggaccctcttcctgccaactcgatagaaaccccctcattgcatggagtccagattacgtattatatctaggaagcctttcctgaccccaccttactaggagtgattcccaccctcctctgaacccctgcattatccagcatctgtttttccatgtgacatcaatccaggagtgtaatgatataataacagtgccacgttatgtgccacacactgtgctgaataccttaaatgtgttctttcatttaatactcatgacaacctgtgatgcgtaggtggtctcatggggttcctagccatgcctttagtagctatttacatagctgtgtgtctgtattttcctcactgtgagattgtagtttcctaagagaagggtctctgacttctctctgaatcccagtgtctaggactcattccttcagtattgggtacctactgtgtgccaggcacatagttgtttgtgttgggggaggtagaccatggaatggataaaggaggattcagattcagcataagttctatacagaggagcatctgtgctttgggaacacaggagagcacaactgtgcactgtcgtggtgacattttgcaatgggtcttgaagatcatttaggagtttgctaaggaaatgggctggaggagatagttccagcatacagggtgtattattaagggaacagtgagaagctcagataggacttgggactcatgcaggggaaggttatgatacaaggctggagggacatgttggcagcagtccgtaagttgcctttaccaagctgcagaggtcggggagaggaggagcactcgggaaggaacttacttccagccggcaccattgaatttagtgattcgcgtgacctctcctgtaggacgcaggctcactgttaaggatgtcagctgtagcatctgagcagtgccacagacaagttggcccaggccctgtgctttcccttgacagggatcctgccccttctcactgaatggtcacctctgctcaggtagtttgcccctttcctgccacctctgacctccagaggctatatgctatatgtatatgctaactgctctgtacacatcaagggagtgtgcttcctatctttttttttaaaaaataggtaaaagtattcatatagttcaaaaataaaaaatatataaaaaggtttaaattgagaattatgccccacccactacagtaactaattttataaatctcttgtgtatccttatagagtttctataggagaatataaacaaatactttttcttgcacaaaaggtggcatacagtacattctttttacctcctaatgtgtcttagagatcattttatatcaaatttatctatatctagacattatatctcgatataaattatagacttatttctgagtctgtatctgtatcagatatttctttctttctctttttttttttttttttttttgagacagagttttgctctttttgcccaggctgaagtgcagtggcgtgatctcagctcactgcaacctccgcctcccggattcaagtgattctcctgcctcaggctcccgaatagctgggattataggcatgcaccaccacactcggcttatttttgtattttgagtagagacggggtttcaccatgttggccaggctggtctcgaactcctgacctcaggtgatccaccctcctcggcctcccaaaatgctggaattataggcatgagccaccatgcctggcctatatcattttacttaacagctgtatttagtcttccatgatgtgacacacactaacttattaaccagtctccacttgattgatattttggttgtttccaatcttctgtgactgcagacaatactatacttaataatcttgtgtgtgttactttgtatatgtgaaagagaaattctcctaaatgtaagcattggatcaaaagataaatgcctttctaattttgatagacatggccaaattgttcataagggttttaccaatttatactcccacatgtcattagactgcctccttcaccatagacttgccaaaagtgtgctgtatatttgttgtatgtttttgtcattggggtaggtgagaagtggtatctcagtggagttctgatttgtatttctctgtgattatgagtgaggctgagcattatccatatctttaggattctgtattgggttctgtttgggggtcttgggagactaggatcttcaccccatttcccagatttggaagctcaggccatggagctccacgtaaatggagctagacctgaagtgtgaccggctccatagcccacccttacttgctttgcagacaagcatgagacgaagctgaagggagtcatctatttccaggccattgaggaagtgtactacgaccacctgcgcagtgcagccaaggtcaggggtggagggcaccagaggggggccagagggacagccatggggaaggggtggcctggtggggctctgggagcaaaggcctccagcctgccctctacagaggctccaacccagtccttgttctctttgtcaactttctcttcctttctccctctccccttcccagaagaggtttttccgcttcactatggtgactgaggtacccctccccacttagctgtaaccagcacattaacacctcctgtaccccactcatccctgacccttgacctccccttcatccccctcccttcccccaggcccaagggaggagcagaaagcaggttgcaaagagcaagaagctcctgtgggcttgggtgcctctctctccttgttgcctccctctcctggaaatgacagcagaccccatgggggtctggtgatagagaagggatggccggaaggggtggaggggacccttaaagactagatttaatagggagaaattgataaacaggagatattggaggctggggcctgcttccctagtgcaagtcagccttcctgcccccagccctctggtgcccaccccagtcctgatctctgctcctctggggtcccagggcctggcatcctacttgttgctttttctgtctgccgctgttttgctgagaggaaactctggtcctcactggaaaagcctttgtgtttgatcctcttgatactcacttttgaacctggggcgccaaggaccagtgccccccttgtcagggtatagctctgtcagggtccagggagtttagagagcccaggactgctgtggtgtgagaagggaacatttcagcctggggctcacatggactggtagggtctaggctctggacctatttaggactaagctccagggctttctaggggctgggaggggaaagggcagatagggaggcaggtgagaatattcctgggcatgggtgagccccatcttagaccttcctctcttcctttggcagagcccgaacccagccctcaccttctgcgtaaagacccatgaccggctgtactacatggtggccccatctgcagaggccatgcgtatctggatggatgtcattgtcacaggggctgagggctacactcagttcatgaactaactgccgtgggcctcctggcagagcacaactggggcttttgtataagaagactttaatattctgtaaggagcttggtcctgtgagtttctgggctctggcctcctgaagaaccagccagaagaagaaaagtagaggtggctttgctgcctcctgggagcccagaacttgcagtaaccctttagggtcctgccccaggcccagccagggctgaggagctgtcacagagagggcctcagctctgacctgacacctgctctccccagcctgttttctcttttctaaaagacaaattatggtaccataagctgccaaagatcccctcctgcctcagacccctttgccaggggctttgggggctgagcagagccacatccagagtggggtaatagctcaggcggcccgcttcccatttctcaaaccccgctctgccccattgttctcctttcccttatactttttattaccttgctcaagggccagagatctcaagtgtcaaccttgaggtcccagctccatcccctagttgcagactcatcaccatggttaccatagtgactgcttcattgccatggttacatactaattgctgcagctctgtggcccagcccactgcttcagctgtgggccatctgagggtacgtgccatcatctctccagcccaggcccctgggcatctcatgctggggggaagggactgaatacctttttccttccccctgcctgtgtcttcagccctgatgcacaggctgccagccccccagtccagccctctcccttccactggtgccttgcttagagccagaagggatgaagccgggggatctatggaacagaggaggagcgatgcagttgggagaggaagctagaagggttatggttggagttctgtacagtgttgagtttccgacagggaaagaggattcctccaatgctcctagagagaaagcctgagcaggagatgatgcagcagaggggaagggccctgtggtgccgccgcccttccttcagcctccgaagggtgatggaaatggagagtggaggaccaggcctccagctgtctggcctcgcccttcacgccttaacactaagcccacctcccctgctctccttcccagcattgagcccttggttgcctgggcccaggctgggggttttcagtatttgtaagcatttcagcagaacaataaagcctttggactacggaagtgagtggaaggccggtgtggggcttggcgctgaggcacttggggataggtcttccctccagagcaggatttccaccctattcaaggttccaggagggagctaggcccctacccatgacctccaggtcgtgaccctgccctccacttcgctctgaggacaggctgggaggtaggagggcatgaagaggcaggggaaggcaggaactggtgcagaggtttaatggggcaggagctggggccaggtgaggagaggagggctgtcaccatggcaggaggctgagcaggaggctgggcagaagggtggccgccaggcagtggggctccaggaaagccagcttggcccctgaggtcagccggtcaccatagcggtccagcagcatcaggaccacgccattcgtccagccaaatccctcctgggagaggcagggcagtggggccagtttctggggaagcctcatacccttggtgggggctgtgggctctctccccaggggcactggccctgcctaaccccagcggtacaggaagcaccagtcagctcctcccccgggcccacatgcaggtgagcacactgaggcctggggcgggggtcatgagcagcagagttcaggagttccctggtgttggccagcccacccctggcctgctcacctgaacttcatattctcctcccccaccgggctgtccaccgttgctgacgtcatactggggacaagcgggtgggctgtatgtcaggtactgccccccagctccaggaacaacaaacaaccagagcccctggggagaagctgctctgcctgcccagcagcccctgcagtgctcaggagtggccactgggacagcctgggggtgcagggagggcttgggccagctcaccttctcatacatggctgacttctgcgagtagacatcaaaattggttcggatccaattctgagccagctggaaagccacttcctgggcccgacgtaaaggtgccttggccaggcctagaccccattgcaggcaggactcaacctccaggtctcccatcccagacagagcagtggctgcaccctactctccccaaggagggaaagaggcctgggccctaagacttccttcctgagaccacaggccaaactgcccttaatcgacggccctggtttgaagggcgaacaggactgattgcactggacaggctgggtggacataagtgtcaagtggaggccaggagagcagaggagcgagagaaaggatacggggcctcttgtgtcttttgttcatgcctccccagcaccagggaggcccacctctacaccctgggaagggtccttggctgtgtcagccctgcctccctacctctgatgaccaggtcctgcaggggggcccaggcattggggaaatcccactgctggcctgtcttctggagagaggtcgggatcccatactggtaagtcaggatccggttgtcctagaaggtcccagacattcccatgactgtgggtggggctggactgggagccaggacaggacgctggaccccgcgggaagccagacgtccccttcctggctcttcttttctcggctcacagctgccccccggtggctctggtgggacccgcaggctgggacaaggggcatagccggaggaagcgccctcccctgcaggtcctgttcagggtcgggagggggcggtgctgcctgcagtggacccgagccacctgctgtgccctcacctccaggtatttcagagccttgtccgccacgccagggtcagagaaacacccggcccagagtggagtgaggttggatgggtaaaactcccggtttttcttcttcttctcaaggtcgtaatcgaaccaggctccggtctgctcatcccacaggactgtgttcagggcggccaagcgctgcgaccgcaggattctgtacttcgtggcctgggagtcgttccctggggcagtgctgcctttagagccagcagccagtgccctgcctgctgccccaggcttttttcgtggttctactttagcctccccgctttgtgtttctctgcaaaggctgagacaccctgatgaccaaggggatgtgccgatctggagcccaccacatttctggcctatggccccgcactgctcccagggaaccactggagctgatctgtccccagggtctccagggtctatcctcccaagggtactggctgggtggattcccctagctcttagggggtcaagggcagctgtctgagggagagggagtggaaggattttggatgcgtggactagggttcccctcacagaccctagagaccctcacagtaagaaagggaggaagagaggattagggttggctccgtttgttctcttgtctggtacgcaaatgtgagtgcaggcttccactagggcggggctcgacaggctaagttgctgaaggcctgtcacacaagggtcctacttccagttctattgccaagcctgagcaggaaaccaagctccctgctttcccttccctactggggtgctcacccagcctggaatagaagttgctcatcagctcctctgcttggcataggaaggcattcaggtcaacaggcaccagtttgcttgttcggatgccgctaagcgagttggggtttgggcctccaatgagccagcgtgaagagaagtcccagccagactcagccccagccttgagctcagcccacagagcctcccggtctcctgtgaggacagagcagggaaccagccagtcccggctgcaggataggcagccattgacaggagaccagagcctgacacagcaggtgtgcagctgccctgcccccagccctccctcaccctcctgctgctcaccttctggcaaggtgtcagccaactccacatctttgctgtaggactcaggcctggcaaagaggagaggtgggcagcctggcactagtagctactaagcccctctgtggtcaagaagaggctgagccatcttgatccagctgcccttgggccccacagcccaggattgcagagggctctcggtgtcaccatctgagaggccaggctaagtcactcctcctcctgcccggggcattgtgatgctctaaccagagtgagcaggtaagagattgaggggtgggctgcccagttcctcacctgggtcccccataagggacataatagcgattcaggaggtagttctttccctccaagctcacagagacagtcctgttcttggtccaaaagtccaattccaaggctagtgtttcaatgttttccctggagtgaagcagacaacacctcagcccaggcgtgctgcccatccccagccctgagaggtctgagggatgggtgggtctgcagagcagcacagggagggtggtacccactgtagaaaggcggtgtcattggtgtgagtcaagtagcaatccatcatgagggtcaagagtgggggctggctccgctgcaggtagtacacgcgcccaccattggggacatgcccatagctgccaaggggaaggcctgctgagatgccctctccccagcaactggcaccaaggcaatccagctgcatgcccgtggcacacctgcctctcctccccacctaggctggaggtgcctggcccccctcacgttttcaccaggtccaagaagttctgcagcatgcccttcaccgtctcagccatctctgagaggagcagaccctccatgacccagtaggagtccctggggaaggggcagcttaggcaccaccctgctgcctccctctgccctgcacaccagccagtggggcactctgccctgctgaagacaccctgctggccctgggtttctccaccactgccagtcctgcaggccccttggtctcttgggcctgggcgctcaccagtagtagaactcaacaaagcgaccgccaggcacaatgaagggatgttctgagtagatgagagagaaccgctcagggtggctgagaacctctggcttcatctggagtcgggagagagggcaaggggagcctagaatccccacggaagcagaggctacaggcagctgggggatctgaggccccgggagtcacagctttggagccaggcagttgggttcagcgctggctccactgctactcagccatgtaatcaaggcctggccgctgggagccttggggtcctcatccctcacctgccggccttgggagtcccagctcaacttggtgccgggtagaagacccgaccactgagccaggcactgggcaggtatccaccaagcagtggccattacgaagacccagggtgggctgggtgggtgaggggggtgccagccccccatttccgctctactccccatccttgctgccaccacccagccgggcccagaggattggcccatcacccccattctctgagccaggtggggataaaaccccaaaccctttccccaggtgaggggatgtggatgagcaaagtagctcaggacagggctgaacacagggcctggccccacgcagcagtagcactgattcctcctgagacggaggcctggcccaggagctcagggaaggagagagcccagcaggcagtgaacatctacccagtggtgccagaggcagtgctgggcagcctggaggtggcagggcaggctagggtttcctggggaggctagggagccttcctggaggaggcgagatgttagaagtagatgctgcccttctgacctcagaagttctttctagagggcctctatttggggacccaggggccagggactggtttctcaggaaaggaaacctgatctgtgctccgaagacactgtgggccccaggcacattcctctcttcagttcccttggtcaggccttgggcaggcccaggacgctgataccttcttccccagcttcttccagagctgatgcagctgccctgcccaggcacgcagtttggcatctgaaatcttctgcaggaactgggggctgaaagaacacaggccccacagggttcaaggaggcagctcagttggaaggaaccctctcttgttccccttccagagtcatacctgtctttccagtctgcaggggtccagggctgcagctcctgccccttggcctggaagtgttcgtggacaaacgcctgcagctgctccctggggatgctgtgattgtggtccctggacagctcagtgaaggtctgcaggacttgttctggagagcaggcagcagggaggggtcagcagggtgtcacaagccactccctaatcacaggggcctctctacttggtcttgccccctgccttctttggagagaaggttctctggagaggacgttcagccctaggtgcttcacctggagctatagacagtggcatgtccacaaactgcttgtcatcctggtagagcttggccatttgaacttggtttaggagctccccgtggcagtaaatctcactgcagagacagggataggagcaggtcaggtcaccaccaccaccccattaggacagaagagaaggctagagtctgtggtagactggtcaaggcatgttccctgggactggacaagggctgtgtgtgcgtgcgtgtgtgtgtgtgtgttaggagtttgtgggttggagtgacatacagggctgagggaacaagtagggtctttgggcagtaaagtacctgtccgactgcctgagcccacactggttgctaatttgagatggtgtagaatagctggtggacaaagggaggttagcactttaatcatactggtgtggccaattctctgtacaatggccctgtgtagactcgatcggaagggcttatggcagaaacctgggaggtgcactcagtggtgatggctgagattgggccagaacatttccaggcggtgtatggtataggccatttgagagacaattactagctggctcttgggtgtttcctgaaactgcctccatgacggcaggacacaaaataatcctgaaacctgaaatacccataatgtcttgggtgatgtcagaggaacactttgtaacgaaggcagtgcccagaagagttcctgaataaaatggaaatggtttattcaggagtctgctgctcagggaatgcaaggaggtgctaatggtattcaggagcaggaagcctctttccccctagggccaactttggaagcaccgaggagctgatggatcctagtgccacatagaaggggccctatgaacagctcttggttgaacaacaaaaagctgcttggtttatgggtagaaagaccttgtttggaaggcctttgcactctgactgaggatggaaaatctttgaagaaggtaagaacaaatcacctcagtggactgaattgcatgctgttttccttgcagtgatagaagaatcgaatgataaaagcccctgtgtttgggtttttgctgacttatgggcagtagccaatggcctggcagatgggcagtgaaaaactgaactattaaagtgttgcccacctggggcataaccctatggaaaggtaaggggcacattaaagtagctttgcatatcaggtcgtagatgcaaatgtgcaaaatactacaagatgctatattagaacagaagatgctgtaccaatatggaccaccaagttacatttcttcagatccaagaacacaactgacagcacctagtgtccaacaatgggccaagcaataccacagcaaatggacatacggtgttgcataccgtcctcagagtagcgctttgatagaaaattggaaaagagagtcgaaacatttgctgtctacagtgggggagggagataaaagcatgaaggggtggcttacataccttcaaaaatgtgtgctctggccgggcacagtggctcatgcctgtaatcccagcactttgggaggctgaggtgggtggatcacttgaggtcaggagttcgagaccaacctgggcaatatggtgaaaccccatctccactaaaaatacaaaaattagacagatgtggtggcacgtgcctgtgatcccagctacttgggaggctgaggcaggagaatcacttgaacccaggaggtggaggttgcaatgaaccgagatcacgccactgcaatccagcttgggcaacaaaagcaagactgtgtctttaaaaaaaaaaaaagtgtgtgctcacattcagcttgagaggagcaaagggaggtctccattggttggattcccctaatttttctgggggatctgggaagagggagggcggagttgttggtatgactatatgatttgttcccacatcatctcaactacttttttcctacccaatacagtggccccacgactaggactgcaaatgtgggtgtcagaagaagggacaattctcaaagaaaaaactgcaactggctgggtgcagtggctcacgcctgtgatcccagcactttgggaggccgaggagggcggatcacaaggtcaggagaacgagaccttcctggctaacacgatgaaaccccgtctctactaaaaagtacaaaaaattagccaggcatggtggcgggtgcctgtagtcccagctgctcaggaggctgaggcaggaggatggcgtgaacccgggaggcagagcttgcagtgagccgagatcacgccactgcactccagcctgggcaacagagcgagactccgtctcaaaaaaaacaaaaaaagaaaaaactgcaactgtacctttaaaccttcatgccagatttactaagggcctgatggggtgtgttgtggcttcacagcatctggctaaatttggcttcttagtgaatgcagctgtattgcctagtggtcaagatagcccactagttccgcacctttgtaactcttccttatatgcatgggagcagactgagggcgaggcacctgcaacactactattactgctggcaatgtggatcagcacagtggccaagcctaatgtcccttacaaaggtggaaaaatttggtaaaaatcaatgataggccgggcgcggtggctcacgcctgtaatcccagcactttggaaggccaaggcgggtggatcaggaggtcaggagatcaagaccatcctggccaacatggcaacacccccgtctctactaaaaatacaaaaattagctgggcatgatggtgcctgtaattctagctacttgggagtctgaggcaggagaattgcttgaacccaggaagtggaggttgcagtgggccggtattgcaccgctgcactgcagcctgggcaatggagtaaaactccatctcaaaaaaaaaaaataaataaatgacagatggtgaggaagagacatagtagctgagggtaaaggaatgagtaaatgggttatacaatgaggggaatccaatatcacattggtgtctggagagactcgaaacaagagaataagattgtctcttagcacgattataccagatgcctgaaagggggaagccatgcatttgccaagacgactcctgctgttgggccctgacaaggtcaaatggcagcctgcaaacctgagtggcactgctctgagatttggtcatgtgatatgatgatgagctgcactaattgctgacaacaggatgtaactctagcaatgcgccagagacttttgactcttaattttcaggttacatctactacgaaggataccatttgggaaggaatttccaggaactactctttttggggcctttggattgtgtgatttacaactcatggcagactaatcactgtgtaactgtaaaccttgatcactgaatgcttagaaaggtctccagttaaaatgagcgaaatacagcagcagcatggccagcctgtcccaatgagctccatgcacaaatgcagatcacccttgttttcgtggatgaaaagctgttaaacagaatagaaaaaagttttattttattttttattatttttatttttttttagacggagttttgctcttgttgcccaggctggagtacaatggcatgatctcagctcaccgcaacctctgtctcctgggttcaagcaattctcctgcctcagcctcccgagtagctgggattacgggcatgtgccaccacgcccggctaattttgtatttttaatagagatggggtttctctgtgttggtcaggctggtctcaaactcccaacctcaggtgatccgcccgtctcagcctcccaaagtgctgggattacaggtgtgggccactgcacccagcctattttttctttttttagacaagggttcgctctatcacccaggctgaaatgcagtgatgcaatcacagctcactgcaacctcaatctcccaggcccaggtaatcctcccacctcagcctcctgagtagctgggactacaggcatatgccagcatatccagctaattttttctatttttttgtagagacagggtctcaatatgttgcccaggctggtcttgaactcctgggttcaagtgatcctcctggcttcaagtgatcctcccggcttggcctcccaaagtgttgagattactgtgatgtgggccagcatgcccagcccaaatgggtttcttatagtattaaagcagtagacatcccatgatttgtccaaattctcctggggaacagccccatactgagacaaggaaggctatgggaggccttatggcatactcaaactaattacacctaggtgtgatgtccactcatcgaaccctactatggggaactcacaaattctgggtacaaaacatgtatgctaacagcactcaggcctttaatacaaaatggcaacagcatacatggtggaataaacattggcccatgagatagaaaaggctctaagggagataagttcccccatcatggaacaagctgaatttattaatcctatttttatcaccttaaagtcttttatccctaacaaattttttttttttgagactgagtctcattctgtcgcccaggctggagtgcagtggctccatctcagctcactgcaacctccacctccctggttcaagcaattctcatgcctcagcctcccaagttgctgggattacaggcgtgtaccaccacacccagctaatttttgtattttagtagagacagggtttcgccatgttggccaggctggtcttgaaccttctgacctcagatgatccagctgcctcgacctcctaaagtgttgggattacaggcgtgagccaccgcacccagcctacaaatttacttttaacaaggagaagcatttagagaaaaagacatattagaggaggagggaatacttccaaactcttcctacaaagccagtattaccctgataccaaaaccagatgaagacacatcaaaaaaaaaaataaaactataggccagtatcaccaatgaatattgatgcaaaaatcctcaacaaaacactagcaaaccttggctaggcatggtggcaaaaccctgtctctacaaaaaaaatgaaaaaattagctgggcgtggtggcatgcaccatgttgcttgggaggctgaggtggcaggatcgcttgagcccaggaggcagaggttgcagagccgtgattgtgctgccgtactccagcctgggcaacagggtgagactctgtctcaaaaaaaaaaaaaaaaaaaaaaaaaaaaagattttccatgttcattatttatggattggaagaatcaatattgttaaaatgttcaaatgttcatatgggctgggcgcagtggctcatgcctgtaatcccagcactttgggaggccaaggcaggcggatcacttgaggttaggagttcgagaccagcctgaccaacatggtgaaaccccatctctactaaaaatacaaaaattagccaggcgtggtggtgcatgcctgtagtcccagctactcgggaggctgaggcaggagaattgcatgaacctgggaggcagaggttgcgccactgtgctccagcctgggtgacagagcaagactccatctcggaatgaataaataaggagctcataaaactctattaaaaaaactaacaatccaattaaatatgggcaaaagaactgaatagacattactcaaaagcagacatacattcccttaagtaagaaaagaagtaaaaaagaagacatacaaatggcaaacaagcaaatgaaaaggtgctcaatataattgatcatcagagaaatgcaaatcaaaactacaatgagatagcatttcatccctattaaaatggcttttatccaaaagccaggtcataacaaatgctggtgaggatgtgaagaaaaggaaaccctcatacactgttggtgggaatgtaaattagtacaaccactatggagaactgtttgaagtttcctcaaaaaactaaaaatagagctaccatatgatccagaaattccattgctagatatatgaccaaaagaaaagaatcaatgtattgaagagatatctgcactccgatgtttattgcagcactatggacaatagccaagatttggaagcaacctaagtgtccatcgactgatgaatggataaagaaaatgtggtacatatccacaatggagtactattcagccataaaaaggaatgagatcctgccatttgcaagaacatggatggaactggaggtcattatattaagtgaaataagccagacgcagaaagacaaacttcatatgttctcacttatttgtgggagcttaaaattaaaacaattgaactcatggagatagagagtagaatgacgattaggagaggctagaaagggtagtggtatagtggcaggagtcgcagggaggtggggatggttaatggtacaaaaaaatggaaataatgcataagacctagtatttgctagcacaacaggtgactgtagtcaaaaataatttaattgtacatttaaaaataactaaaagagtataatcagattgtttgtaacacaaaggataaatgcttgaggtggtggacaccccatgtaccctgatgtcattattacccattgcatgcctgtatcaaaatatctcatgtaattcataaatatatatacctactatgtacctccaaaaattaaaaaaaaagaacaaaacaaaacaaaagattaagtgaggggcttcaaatgtcttaaatattaaataaatgtaaggtattactttttatttaaaaaaagaaatcaatttccagttccactcccctacccagagattgggaggtcaggctgatatcacttggctcaaagccccacctctccaaacacacagtttggtctttctggcatgtccagtcctcgtcctgagtcagctagttagtataatccatctagagcctcaccatgaataccaaagacacacctatcatttgggaaattccaagagcttagaagttactacccagcaacctgggtcaaagaacagacaaactctattatacaacagtccagtccctagcctttacccgtagatcccttgtagcaaaacaattatgctttcctgagcaactgcatttgggatagcatttttataacagacaaagagataatatcaacatgaatatgccgaaaatttagaggagctaatgtggaagtagagataggagcttttagctcaattccccaatacatgtgaccctcaatattagaattataatcttgccaacaatgccagtgctttattatggtagaagtaacctgaaaaataagagtcaaaagatgttcacacattactagagtcccattgtcattaataattagtccagttcatcaccagatcatatgacaaaatgtctcccaggataaggccactcaggctggcaggttcccctttgatcctgtcagcttccagagcaggagtggtcttggcaaaatatggctttaccctttcaggcgtcaagtataattgaatgaagaggcggtatcatctttttctctgatcttctttctaagcattaatgtaatagtggacttccctcattgcatttcttattaatgcatggattcattcatttattcccagctactacacctctttctctccatttatacccaaacttttccacctttggaaaggacattgggttaggccactgtatttatccagattgtaggtagaaacacttgtcttgtaaatgcttctccttcagtccactcccattcatatagggcaggcttacataggtacagaactagtaagctatcttgagcagtaggcaatatatttgtgtttattgttagccccatttttgctagataaggtgaaggcacaacctgccccatcagacccttaggaattttcacataaaagtttaagaatatagttatatttttttgcttaggaataattcctgcttcttgcatttgtatctgcagtcctaattcagaattctagcagataaatgtaacaaagagattaaaataattgaaaagaatcaagctgaaaccctagagctgaaaaatgcaattggcatactgaagaatgcatcggagtcctttaacagccgaattgatcaagcagaagaaagaattagtgagcttgaagacaggctatttgaaaatacacaatcaggagacaagagaaaataaaaaacaaagaagcatgcctacaggatctagaaaatacaatcaaaatgcctcaaaatggcaaatctaagacttattgtacttaaagaggaggtagagaaagagatagggacagaaagtttattcaaagggataataacagagaacttcccaaacctagagaaagacatcaatatccaagaacaagaaggttatagaacaccaagcagatttaacccaaagactacctcaaggcatttaataatcaaactaaaagtcaaggacaaagaaaggatcctaaaagcagcaagagaaatgaaacaaataatatacaatggagctcagtggttcaaactggtgagaagtctggcagcagacttctcagtggaaatcttacaatccagaagagaatggcttaacatatttaaagtgctgaaggaaaaaaaaacttttacccttgaatagtatatctggtgaaaatatccttcaaccatgaaggagaaataaagactttcccagacaaacaaaagctgagggatttcatcaataccagaccagtcctacaagaaatactgaagagtatacttcgatcagaaagaataggatgttaacatgcaataagaaaccacctgggccgggcatggtggctcacgcctgtaatcccagcactttgggaggccgaggcgggatgatcacttgaggagttcgagaccaacctgaccaacatggtgaaatcctgtctctaccaaaaaatacaaaaaaattagccgggtgtggtggcacgcacttgtagtcccaggtactgaggaggctgaggtgggggaatcgcttgaaccggggaggtggaggttgcagtgagctgagatctcgcccctgcactccagcctgggcaacagagtgagacactgtctcagaaaaaaaaagaaaaaaaaagttaatgatcgctgggctcagtggctcatgcctataatcccagcactttgggaggctgaggcaggcagattacttgaggtcctgagttcaagaccagcctggccaacatggagaaaccccatctctactaaaaatacgaaaaattagctgggcgtggtggtgcatgcctgtaatcacagctactctggaggctgaggcatgagaattgcttgaacccaggaaatggaggttgtagtaagctgagatcgcacgccactgcactccagcctgggttgacagagcgagactccatctcaaaaaaaaaaaaaaaaaaaaaaagaaatcacctgaaggtacaaaactcactggtaatagtaagcacacagaaaaaacacagaatataataacactagaactgtggtgtgtaaactactcttatcctatgtatctgcagtcctgggaccactgggatttactggaaccactgaatcagctgggaaaaagaaagtttaatgtagggaaaaaagaaaatggtatagtcataccacattggaagaattgttagtcattgtctcccagcccctcttccctttaacttccagaaaagcagaagaatctatctaatagggacaaacccttgagcccccttgcgttgagtgtgagcacatacttgtgaaggcatgtaagccagcctttcataccttcatacccttattccctgctgttttagatagcacatgcttcaactgcccatcccagttctctattgaaccactcctctgaagatgaaagtgtttcttgatctgaagaaatgtaactcagtggttcaaattggtggagtatcttttgttctgacccttttacagtgtcagtattttgagcatttgcatctaccactggccatgcaaagcccagtccagaatcagtgtctactcttgtcaggacccaggtagccctccaggcctaccagcatcagtccaccttgccaggtatgtgcagggccttccctccaaggtcatcttcccacagccatgtgcggtctttctctttttggcagacagaaaagtacttactggcattttgtgcctcagcgggaaaacaggactaagtctaaattcagctcttctctgcatggctgctgccctgcaatgtccatttatttcatgaacacacgtggccacctcaggtgagcacgcagggatgtctgcttgttgccccagttccttttgatcctggaaaggggtccttctgatggacatcaacataacctgctttaatgcactcctaaaattcctgttgtgatttccatatagacaaggttcccattgtccttccgcctgaccatatggccaggccattggccactgtccaagagttagtaaaaacctaaacagtatgcaattcaacccacagagctgatttgtttttgccttctttgatcagagtaacaaccttccaaacaataggctgttcattcaccttgggactgccatccataagccaaacagctttgttggtcaatcgagagctgtcaatagggcactgtccaattggcaatagaatctaacaactctttgagtgggtccaaagtcagtcctaggggaaaagagtctctctgcttttgaatacactgagtaactgcattcccccaggagcttgttcctgatccagccatttccatttcattatggaactcttctgggccctgcccactctctgtgagcatttccccaagatattataggtatttcaggtttcaagattatcttacatccttcagtcataggggcaatttcaaataatgtctgatagcaagctaataattacctctcacatggaaattatctagtccaaagtctcagcactcgtgccaggaggtgctctaagacttttgctataaagtccagtctatgctccagagaaggctaacaatctctgtggacttgggcaatcttattggttcccatttggaatgtctaatcaatattgcttgatgagtggatttccataccttctgttttacaatactaggtagtggaaatatttcctggtcagatacaatatccatccctgtaatacattcaggtagaagagatgcaaccactccacataaaacctgttcaagcgcataccacttttttgttttgttttgttttgtttttgagatggagtttcgctcttgttgcccaagctggagtgcaatggcgagatctcagctcactgcaacctccacctcctgggttcaagtgattctcctgcctcagcctcctgagtagatgggattacaggtgcgcaccaccacacccggctaattttgtatttttagtagagacagggtttctccatgttggtcaggctggtcttgaactcctgatctcagatgatccacccacctctgcctcccaaagtgctgggattacaggcgtgagccactgcacctggctgcatttttatattctctcaatctcattgcagtgcccatcaggacttcagcaggtgtttttggtaccacagtgcaggactggaggttgtaattccactgaccagaatctaagcatggcccatcttttactttcagtttggctattagagataaaagtctatagggattgtatatttgcttttcttcttcttagtatacatttccctatgcacatgagtcaactccccaaaagttagtgatcaatcacctctaatttccattggtaacttttacctccagtaactgattgcagcatgactgctcttcacaccatgggtgaccctgtatccactcgagaatgaaaggtttctcatcccctgccctttcaacttttcttttcccaacccatatgtttcagtgagtcagggtcattctagtaaatccacattttctgacaccaactgcaatactgcaatttaatcctggcactaaccatcgggagttagtgcagaatccacactcaggttaagggcacggtcctgagtgagacggcctcacttctgacaccagccacaagttcaggggtccccaggccacctgcacttattaccaagtggctacaaatgtaggggttcccataaccctttcagatttgataatttgctagaacaactcacaggactcagaaaagcttacggttatgcttagggctatagttttattataagaatacaagccaggatcagccaaatgaaggggtgcatggggcaaggtctaggggggccctgaatgtagagcttctgtgtcctttccccatggaaccaggacgtttcccctcctggctcatcaatgtgttcaccaaccaggacttggtatttatttgttttatttgtttgtttgttgagacagggtctcactctgtcacctaggctggagtgcagtggtgcaatctcaactcactgcaacctccacctcccaggttcaagtgattctcacgtcttagcctcctcaatagctgggattacaggcatgcaccaccacaccctgctaatttttggcatttttggtagagacagggtttcaccatgttggccaggctgctctcaaatgcctggcctcaagtgatccatccacctcggcctcccaaagtgttgggattacaggcatgagccactgtgcccagcctacttaccaggactttgaagtccagagtttttattggggtttcatgacatacgcatgattgattgaatcattgatcatgtaattgaactccatctccagccccttctcctccctgaaggttgagaagttgggctgatatcatgtggaccaaaaccccaaccctctacacacatgcttggcctttctggcacggcctgccttcatgtggagtcgtcttgttagcagaagctgtctagggacccaccataagtcacctcattaacaaaagctaccaagagcctgggaaacatggcaaaaccccatctctacaaaaaatacaaaaattagccaggcatggtggcacacacctagtcctagctattcaggaggccaaggtgggaggatcacctaagcccagagagattgaggctgcagtgagccatgactgcaccactgcactccagcctgggtgacagagtgagaccctgtctcaaaaagcaatcaggccaggtgcagtgactcatgcctgtaatcccagcactttgggaggccaaggtgggtggattgcttgaggtcaggagtttaagaccagcctggccaacatggtgaaaccccgtctctactaaaaatacaaaaattagccaggcgtggtggtgcgtgcctatagtcccagctacttgggaggctgaggcaggagaatcacttgaaccctgggggcagaggttgcattgagccaaaatctcaccactgcactccagcctgggcaacagagctagattctgtctcaaaaaaaaaaaagaaagaaaaaaacaacaacaaaaaaacactaatcagggaccactattaataacagacattcctatcacttgggagattccaagagcttagaggttactttggaggaacccaagacaaaaatgaaactaattcctcattatacaagaagtggcttatacatgaaaggattgactcagcaggtctgctgtgttcaaaccctgcacatttcagagaaaattctggcctgtgaccagccctgagagatgagatttaaattaccaaaatatgctgcctgataagtctttgtttttctggggccttgggccatgccagatatttgatgctaataatgtgatttgtggcaggggcctttggccgcccagtatcagtttgaactctggagagtgagtaactgaggtcagccacacaggtagtccacgctttcatcactgacctccaataaaaacactggacaccaagactcaggtgagcttttgtgattggcaatacttcatgcgtgctgtcacatgttattgctggaaaaatcaagtcctgtccatataaatccactgggagaggaaaaactggaagattgagattattttctcctggacttggccctagaatatttcacctttgatggctttaacatgtatcttttcactgtaagaaaccataatcaaggctgggcacggtggttcatgcctgtaatcccagcactttgggaggctgaggcaggcggatcacaaggacaagagattgagaccattcttgccaacatggcaacacctctgtctctactaaaaatacaaaaattagctgggcgtggtggcaggtgcctgtagtcccagctactggggaggctgaggcaggagaatcgcttgaacccagaaggtggaggttgcagcgagccgagattgcaccactgcactccaacctggcgacagagcgagactctgtctcaaaaaaagaaaaaaaatgaaaccataatcatggtataaccatttggaagtgttagtgaatcactggcctgaggttggtcttagggaacaccagtaaagtcatcttcccctacatttggcaaacagcctaatgcttgacaaagcactggaccacccagcctctctgaagtcctcattacaattgctcaggacaaaacctattaattatcccaggtacacttttcccctttatattccacaattgtcatgggcaagcactgtcaactctccctgtaacacacaccctctattgaaccccttgtctctgtctctagtctaaccactggaacccaagcccaaaccttgttgcctggagccccgctctccccggacctgttcccactctgccccaatcacacaggccttcgtcccaatccctgaacagtgcgtcagggcctctgcatggccctttccatgcctggactgtcctctcccagatcagctcagcaatggttcctgccacaattctgcttacacatcacctcctcagagacaccgtccctccccatcctctctaacacaccctctgctcacccacaccagcgggccctaacttctctctacttcaaactgtgcttctgttactgttttgcttctattattattattattattatttgagatagagttttgctcttgttgccccgactggagtgcaatggcatgatcttggctcactgcaacttccacctcccgagttcaagcgactctcctgcctcagcctcccgagtagctgggattacaggcgtgcgccaccatgcccggctaattttgtatttttcatagagatggggtttcaccatgttggccaggctggtctcgaactcctgacctcagatgatagctcccaccttggcctcccaaagtgctgggattacaggcatgagccaccgtgcccagctgtttttcttctattattattgttcttgcaggagctggtaaagtggctgatgtggccacagctccataaatccatgtggaacgaagggtggacatcgcctgagtccaggagacaggacagggtcactcatctctgtccctggtgatggaaactcaggctcaggaaagagccttgacctgccctgggtcacagagagaatatgagggtcagggctcaagcccaagtgctgtcttcaggcccttaggctgcctctcacacccagactaggaagctggagcagaaagtttgctagaacaatcctgagaagaggcctgcacagttcaaggggcagcttggaggaggagaggaagggagggcgggctctggccagcaggctcttggacctcaggccaggctctggcagctgcgtctggtatcaggactgcaggtcccgacagggggcggtggctcacgcttgtattcccagcacagtcgccaagcctaatgtcccttccaacggtggaaaattttggtaaaaatcaatgacaggctgggcgtggtggtgcatgcctgtgattccagctactcaggaggctgaggcacgagaatctctcgaacccgggaggtctaggctgcagtgagtggagatggtgccactgtactccatctggacgaccgagcaagactctaacaacaacaacaaaaaaaacggactgcaggtgcagtgcccagcacagagcctgctacataggaattctcattttcttctcttccctactctttccttcctttataatctcttcctttccctctgaagtaccgaccccagagcttgagatctcatcccagcctccctcttattgccatcctcccctgctgccttccccacacccctacctctcacagggtgggggtagggcctcctgggaccccagtcccagccccagcagcagtagcaggcacagctcccaggtcctccctggcatggtggctgtgactgtgactgaatgagcaagcccaggcaccttcggcttgctgggcacagcctggctcacctgcctgtccaagtcggccaaagtccagcctttgaggcgtggccacctgaggggacgtgtgcttggtctgtgtgtggcccgcttgcccctcctgctctcagggcacagtggccacctcccttgcttctactttgcctcttctatttcacagtctcagctggtgccaatggctcaggcccttccctcagagcatggtggtgggggtggggagtgggcacccaaaggccagggacacagtcgaggccacacacctgtaacctggatgccaggttccttgggtggccccaagaccaccaacctcagagagttaccatttcccttaacatttcaaatggaatggctcaagatcctgtccctggtgtggtgtgaaattcagggcctctcactgttatctgcaagagatacagcggaagcacaggacagtagaaccattctgtctggggaggactaagggagacccacaatagtgtgtcatttgtaatgagtctttttttttttttttttgagactgagtctcactctgtcgctaggctggagtgcagtggcgtgatctcagctcactgccacctccgcctcccgggttcaagcaattctcctgcctcagcatcctgaatagctgggactacaggtgcccgccaccacgcccagctaatttttgtatttttagtagagacggggtttcactgtgttggccaggatggtctcaatctcttgacctcatgatctgctcgccttggcctcccaaagtgctgggattacaggcgtgagccactgcgccagtcctaatgagtcttgatgaccgcataggagtttgccaagggaaatgggctggagaccactacaatgtatgcagagcatgtgaagagaagagcaaacccctcagcctagctgcagagaacttggtgttcatgcagggaagggttttgagatagactggaggaacatgttggcaccagtctggaaatggtctttgccaagccaaggaatgtaattccttgtaattccccaaagtggaaccagcagagaagtttgtgagcttaagaagcagattcaggctgggtgcagtggctcatgcctgtaatcccaccactttgggaggccgaggcgggtggatcacctgaggtcaggagttcaagaccagcctggccaacatggtgaaaccccgtctctacaaaaatacaaaaattagctgggcatgatggcgggtacctgtaatcccagctcctcaggaggctgaggtgggagaatcgcttgaactcgggagacagaggttgtagtgagccgagatcatgccactgcactccagcctgggcgacagagtaagtctctgtctcaaaaaaaaaaaaaaaaaaaaaaaaagcagattcggttactttaggaggctcatcccctcaacatatggaaggtgagctgaagggacaggggacagggggtgggcaaggcacatggagtttaatgataggcatgacctctcctgaaggacttaggtttgcagttaaggatgtcagttgtggcacctgagcagtgtttactgctattaaaaagaaaaaccttagacaaattaaatttaaccatttattcaagcaaagaaatgactcatgaatcaggcaccactctgaactagtaaaggttcagatagctccacccagtaatgtgggcagctggcattgttttttttgtttgctttgttttttgagacagggtctcgctctgttgcccaggctggcatgcagtggctccatcacagctcactgcagccttgatctctcaggtttaagggattctcccacctcagcctcctgagcagctgggaccacaggcacatgccaccacgcccaactaatttttaaattaaaaataatttttttttttttagagattgggtctccctatgttgtccaggctggtgtggaactcctgagctcaagcaatcctcctgcctcatcctcccaatgtattgggattacaggtgtgagccaccatgcctggtcaacaatttttaagtgtacaattcaatttccttttattacattcacaatgctgtgcaaccacccttgcattctttggataaatctcacttggtcatgatgtctaatccttttaataaactgttggttttggcttgcgagtatttttttgaggaattttgcatcaatatgtatagagcatatttgactgtaattttctttccttgttttgttttgtttttttttttttttggacacatagtcttgctccatcacccagcaggctggaatacagtggcatgaacacagctcaccacaacctcgacttcctggggctcaagtggtcatctggcctcaaccttctgagtagccaggactacaggtgcatgccaccacgcctgggtaatttttaaatttttttgtagagactacatctgactgtgtcgcccaggctggtcttgaactcctggcctcaagtgatcctcccgccttggcctcccaaagtgtttctccccaagtgtgagccaccatgcccagccctcttgtgatgtctttatctggttttaatatcagggtaatgttagcctcatagcatgagttaggaaatatgcccctcttctatttgtggaagtgtttgagaaggattgttaattctttaaatgtttggtagaatttaccaatgaagccatctggtcctggaccgtattaggcagaaacaatacatatatgggggatgggggtagagagagagagtttgagaggtagctggcaagtccaaaatctctagggtaggctggcaggctggagaaacagggaagaagctgcagttcaagtctgaaggcagcatgctgagagaattccttcttcttctggggaggtcagtctttttcaaattaaagtcttcaactgattggataaggcccatccaagttagggagggtaacctgctttactcaaagtctacaaatttaaatgttattttcatctaaaaaatatcttcacagaaacatctagaataatgcttgaccaactatctggatacctttgcctagccatgttgacacataaaattaaacatcttttttttttttttttgagatggagtctcgctgtgttgcccaggctggagtgcagtggcatgatcttggctcactgcaacctctgcctcctaggtttaagcgattctcctgcctcagcctcgtgaatagctgggattacaggcgcccaccaccacacccagctactttttgtatttttagtagagatgggttttcaccgtgttagccaggctggtctcgaactcctggcctcaggtgatccacccgccttggcctcccaaagtgctaggattacaggcatgagccaacgtgcccagccaatgttctttaaaaaaacacatgactctacagtgattgtactaacttacattctcaccaacagtatatgagggttccttttctccacatcctcaccagcatttgttattgcctgtcttttggataaaagccattttaaccgtagtgagataatatctcattgtagttctgatttgcatgtctctgatgatcagttatgtagcgcaccttttcatatacctgtttgcgacttgtatgtcttcttttaagcaaggtttatagtgattcagatcttctgcccattatgcagactggctttgttctgggggaacacctcattatattgcgcaggctggtctcaaactcctgggctcaagcaatcctcccaccttggcctctcaaagtgctaggattacaggtatgagccaccatgcccagccagtagtgttttttttttttttttttgagacgaagtcttgctctatcacccaggctggagtgcaatggcatgatcttggctcactgcaacctccgcctcctggattcgagtgattctcctgcctcagcctcctgagtaactgggactacaggcgcccaccaccacacccggctaatttttgtatttttagtagagatggggtttcaccatattggccaggctgttcttgaactcctgacctcatgatccacccacctcagcctcccaaagttctgggattaccggcatgagccaccacgcccggcctccagcagttctttttttagtattatatgtttacaactaaccaagtctactcaaataacactacatttcatggtagtgcaagtaccttatgataacaaagtagtcttaacttctccctcctgtcccttctatcattgctgtcattcagttcccttatccataaactagaatcgttgaatacacagttgctattacagattgagcaccccaaatctgataacccaaaatctgaaatgctccaaaatccaaaacttgttgagtacagacataatgatcaaaggaaatgctcactgaagcatttcagattttggatgatcagatttgggattttgaaccagtaagtatattgcaaatatttcaaaattcaaaaaaaaaaaatccaaaatccaaaattctcctggtatcaagcattttggataaatgccctgttttattttgaacaaaccattatctgttagattaactaaggataagaaaagtaaaagcttttattttaccttcacttattccttctctaaagctcttcccttgtttatgtagttcaaagtttctaacttatatcatctttcttttctctgaagaagttttttttttttaaatacttcttgcaagacaggtctacagattctctcaatttttgttggcttgtgaaagttctcatttctccatcactttttttttcctttttttctttttcttttctttcttttcttttctttttttttttttttttttaagacagattcttgctctgttgcccaggctggagtgcagtggtgctatctcggctcactgcaatctccgcctctcaggttccagtgatcctccagcctcagccccccaaagtagctgggaccacaggcatgtgccaccactaaagtttgtattttttttgtagagacggggtttcatcatgttgcctaggctggtcccaaactcctgagctcaaagccatctgcctgcctcggcctcccaaagggctgggattacaggcatgagccactgtgctggcctctccatcacttttgaaggatggttttgcaggaaagagattctagggattataggttggtggggtcttcttctctgtcaatgctttaaatatctcacatggctctcttcttccttgcatggtttctaagaagtctggtgttatttttatccttggtcctccataggtaaggttttttttactcctctgccctcttccaagactttttatctttgaatttctgcaatttgaatataatatgcctaggtgttgattttttcttctttttggggggcatctgtcttccttagtattttctgagcttcctggatctgtggtttggtgtctgatacaaatttggggaaattctcattcattattgtttcaaatgtatcttcagttccctctttcttgctctgtattcccattaatgcatatgtgatgacttttgtcattgtcccacagttttggatattctgttctgtctgtttcagtcttgcctctctttgcttttgagttttggaagtttctattgacatatcctcaagttcatggattctttcctcagctttgtccagtctactaaagagctgatcaaaggcacttcctttgtgtttttttctcctcattgtacttcttctttgtttttttcttagaattttcatccctctgcttaaattacttatctgttcttgcatgttgtctactttttccatgagcacccttggcatgttaatcatagttgtttcaaatttccggcctgataattccaacatccccgctatagttgagtctggttctgttactcgctctgtcgcttcaagtggtattttctgccttttagtaagacttctagttttttcttgaaaccaaaccagtactgggtaaaagaaacccagtgtggaggtgtctactctggtaagttgtgactctctggatctgcctgtctgtctccagttttggaggcagctctgtgaccttaatttgctctgtgaccttaattctctgacagatctaagaagagttgcgggtgttgtttattcagctttttactgttgttaagatggagtgacagttgccacactccttacaccctaagccagaaacaagaaacccccatttagttctttttttttttttttaatttgagagtctcactctgtcgcccaggctggagtgcaatggcacaatctcggctcactgcaacctctgcctcctggattcaagcaattctcctgcctcagcctccccagtagctgggattacaggcatgccccaccacgcccagctaatttttgtatttttagtacagacagggtttcaccatgttggccaggctggtctcgaactcctgacttcaggtggtcctcccactttggcctcccaaagtgctgggattacaggcatgagccaccgtgcctggccggttctctttgtattttctttttcttttattttctagagacagagttttcctctgtcacccatgcaggagtgcagtggctcaatgacagctccttgcaaccttgaactcctgggctcaaacaatccttccacctcatcctcccaaatagctgggactacaggcatgtgccataatgcctggctaattttaaaaattacagctcactatgttgcccaggctggccctgaaatcctgtcctcaagtgatcctcttgccttggcctctcgaagcactgggattacaggtgtgagccatcacacccagcccttttttaatttttatttttttattattatgatttttgagacaggatcttgctctgttgcccaggctggaatgcagtggcacaatcacagctcactgcagcctccacctcctgggcttaagcaatctcacctcagcgtcctgagtagctgggactacaggtgtgcaccaccacacctggctaattttttatttttgtagagatggggtctcactatgttgccttggctggttttgaactcctgggctcaagtgatttgcctgcctcagcctaccaaatgttgggaccacaggggtgagccactataccccctggccctttttaatactttccatctgtttattgataccctttctttagtatatagtggtcactttttttttctgagatggagtctcgctctgttgcccaggctggagtgcagcagtgcaatattgggtcgctgcaacctccacctcctgggttcaagcgattctcctgcctcagcctcccgagtagctgggattacaggcgcccgccaccacacccagctaatttttgtatttttagtagaagacagggtttcattatgttggccaggctggtctcgaactcctgacctcaggtgatccacccatctcagcctcccaaagtgctgggattacaggtgtgagccaccgtgcccagcctagtggtcactcctataagacaatttctcttgcctggttgtgtgtgtgtgtgtcatacttttctgtttttttgtgtgtgtctcgtaattttttgtaggaaaacaaacattttagataacatattgtagcaatgctgggtactggctgcctcaccacactctacccagagcgtgctattgttcatttgtgtatttggggagcaactggctgaattatggtcctggtctatttcccaccctctgtgttaagcccatgaggttgctcctcggggagacacagctttggggatggctacagccactctggggtgacagtggtcttggcagggctcccttcctctctttccctgagcacatccagcagttaaactccactaattgccagctgattttacaattgttttaatgatgccctgggggataaatagatcagagacaatccattcaaattcagactcctttgaaggaataatatcaggggcagaaataaattatacatatttcttcgggccccacctcccctgctctccttcccagcattgagcccttggttgccttcagactaaggtatttgtaaagccttcagactaaggaagtgagtggaaggctggaggtgtggggcttggcgctggggcacttggggtaggagggataggtcttccccccagagcaggatttccaccctattgaaggttccaggagggagctaggcccctacccatgccctccaggtcatgaccctgccccccacctcactctgatcagaggacaggctgggaggtaggagggcatgaagaggcaggggaagacaggaactggtgcagaggtttaatgggacaggagctggggccaggtgaggaggggagggctgtcactgtggcagaaggctgagcaggaggctgggaaaaagggtggccgccagacagtggggctccaagaaagccagctgggcccctaaggtcagccggtcaccacagcagtccagtagcatcaggaccacgccattcatccagccaaagccctcctgggagaggcagggcagtggggccaggtttctggggaagccccaaacccttggtggtgtgtccggaattggtgggttcttggtctcactgacttcaagaatgaagccacggaccctcacggtgagtgttacagttcttaaagcagcacgtctggagttgttcgttcctcccggtgggctcgtggtttcgctggcttcaggagtgaagctgcagatcttcgtggtgagtgttacagctcataaaagcagtgtggacacaaaaagtgagcagtagcaagatttattgcaaagagcaaaagaacaaagcttccacagtgtggaagaggacgtcagcagattgccgctggtggttcgggcagcctgcttttattctcttatctggccccacccacatcctgctgattggtagagcccagtggtctgttttgacagggcgctgattggtgcatttataatccctgcgctagatacaaaggttctccacttccccatcagattagttagatacagagtatggacaggaaggttctccaaggccccaccagagcagctagatacagagtgtcgattggtgcactcacaaaccctgagctaaacacagggtgctgattggtgtgtttacaaaccttgagctagatacagagtgccgattggtgtatttacaatccctgagctagacataaaggttccccacgtctccaccagacccaggagtccagctggcttcacccagtggattccgcaccccggctgcaggtagagttgcctgccagtcccgtgccgtgcgctcgcactcctcagcccttgggtggtcgatgggactgggcaccgtggagcgggggcagtgctccttggggaggctcgggctgcacaggagcccagggaggcgggggaaggctcaggcatggcgggctgcagtcccgaggcctgccctgggggaaggcagctaagacccggtgacaaatcgagcgtagcgccagtgggcctgcactgctgggggacccagtacaccctccgcagccgctggcccgggtgctaagtccttcattgcccggggccagcagggccggtcggctgctcctagtgcgggcccgccaagcccacgccaacccggaactccacctggcccgcaagcgccgcgcgcagccccggttcccgctctcgcctctccctccacatctctctgcaagctgaaggagtgggctcctgccttggccagcccagaaaggggctcgcacagtgcagcggtgggctgaagggctcctcaagtgccgccaaagtgggagtccaggcagaggaggcgccaaaagcgagcaagggctgtgaggactgccagcacgctgtcacctctcagtgggggctgtgggctctcttcccaggggcactggccctgcctaaccctagcggtacagggagcaccagtcagctcctcctccaggcccacatgcaggtgagcacactgaggcctggggcggggatcgtgggcagcagagcccaggagtttcctgtagggtgatggccagcccacccctggcctgctcacctgaacttcatactcccctccgccaccgggctctccaccgttgctaatgtcatactgggaataagagggcgggccgtaggtcaggcactgcccccaccccacccacccccagccacagggacaacaaacaacgggatccttgtcgggagaagccgctctgcctcccagcagcccctgcagtgcccaggagtgcccactgggcgccgccaccatcccagctgcgcttgccctgagccctgccaagcctgaccctcccgcctcaccacggggacgccctgggggtacggggagggctcaggccagctcatcttctcatacatggctgacttgctggtagacatcaaagttggttcggatccaattctggggcatattggtagatcaggatctggctgccctagaaggttccagacattcccgtgactgtgggtggggctggactgggagccaggacgctgggcccggcgggaagccagatgtccctttcctggcccttctcttctcggctcacagctgccccccggtggctccgcgggacctgccggctgggacaaggggcacagccggaggaagcggcctcccctgcaggtcctgctcagggtcgggagggggcagtgctgcctgcagtgggccagagccaccttctgtgccctcacctccaggtatttcagagccttgtccgccacgccagggtcagagaaacacccgttccagagtggagtgaggttggatgggtaaaactcccggttctccttgttctcaaggtcgtagtcgaaccaggcactggtctgctcatcccacaggactgtgttcagggcggccaagcgctgcgccggcaggattctgtactttgtggcctgggagtcgttccctggggcagtgctgcctttgggccctacaggagccctctagaaagaacttctgaggtcagacgggcagcatctactctaacgcctcacctcctccaggaagtctccccaccctccccaggaaaccccagcctgtcctgtctcctctgggctgcctgcactgtctctggcaccactgggtagatgttcactgcctgctgggctctccttccctgagctcctgggccaggcctccgtctcaggaggaatcagggctactgcttgctcagccccgtcctgagctactttgctcatccacatcccctcatctggggaaagggtttggggttttatcccgtccctagtcctaccactggagcccaagcccagaccctcttgcttggagccccgctttccctggacctgttcccactctgccccagtcacacaggccttcttcccaatccctgaacagtgcctcagggcctctgcacggccctttccgtgcctggactgtcctctcccagatcagctcagcaatggttcctgccacaattctgctcacacatcacggcctcagagacaccttccctccccatcctctctaacacaccctccgctcacccacaccagcgggccctaacttctctctacttcaaaccgtgcttctgttactgttttgcttctattattattattattattggagacagagtttctctcttgttgcccagactggagtgcaatggcgcgatcttggctcactgcaacctccacatcccaagttcaagcgactctcctgcctcagcctcccgagtagctgggattacaggcgtgcgccaccatgcccggctaattttgtatttttcatagagatggggtttcaccatgttggccaggctggtctcgaactcctgacctcagatgatagctcccaccttggcctcccaaagtgctgggattacaggcatgagccaccgtgcccagctgtttttcttctattattattgttcttgcaggagctggtaaagtggctgatgtggccacagctccataaatccatgtggaacgaagggtggacatcgcctgagtccaggagacaggacagggtcactcatctctgtccctggtgatggaaactcaggctcaggaaagagccttgacctgccctgggtcacagagagaatattagggtcagggcttgagcccgggtgctgtggtcaggcccttaggccgcctctcacacccagactaggaagctggagcagaaagtttgctagaacaatcctgagaagaggcctgcacagttcaaggggcagcttggaggaggagagggagggaggaccggctctggccagtgggctcttggacctcaggccaggctctggcagctgcatctggtatcaggcctgcaggtccagtgcctattatggggcctattatgactgcacaaggggcctcaagttcattcaggccaagcctctcattctgcagagaaccacacagtggttgccgggatttgcccaaggctggtgggttggtcatgagggcaggcccgaactcatctctattttcttgcattccggctctcctgatgttccaggcccatctctgagtcatccttggacaggagagatcccagagggtaaacaggacatgagcctgcagtgaggggagacagaggaggagagaactccctgaaacaagaggagaggaggagctggtggggaggacacaggtagggcagcgggcagaccaccaaggggcaggcttgctgtttcgcagcctgacccccagcctgtgtgcctcattgccgcctcctcctcccagagcagggcctacgcctcaaccagagcttggagcaagacaaggaaggctccatttctctcctcctactcctctactcaaaccacagccatctgtacatcagaaacttttttttttttttttttagccctcagctgcctgatgcccatggttggggtttgggctgagtcaccaagggctgcctgcacacaccagggagggctcctgagcacccactctcaggctttgcacgtttccgaaattctgcacacgacagcaatttttgcagcaagggtgtggagggtgcctgtgggccagtcaccagcctgctgcagctgtccgtggttgcctctgtctgccagggctgcacgacctctggttttcacctcaaccactgcggcttcctctctccccgtgggaacagggcatggggtgagggagctaccatgcccagacaactaggcatctccctgccaggccaggagttccactgccacagcccaataccagcaaattcagatgcaaccaagtgaccccaactcaagttacattccctttctcccccacaggctctgcagtcccagggattcgcagtgttagttgatctccggggacactagttcccaagagaccccactgaaggcctggctgtaccatcataggctgtgtgcccttgggcaagaacctctaccattcctcgttgcctgtatataaattgaaggctttgctctaggtcagtgttgcaaactcaaattccagtaataggaatgtgcaaaatatgttggggataagggagccaacagtgcaagggggaagtgagtgttggggacctagtcttggggtgacgggaactgggctgaaccggaagcgtattcctgtgtaagggaggccactgctcagagggtggctgctatggggctgggggatcctgatttgtcaaaggaaggtggaaatttatatttcagctcacacgctcctgtttttaaaatgtctcaatgtctctaattctgactgtaaatctaagagtgattcctgtgtgggtacggttaggaggagtctgacctccaccaaaggggctttgtgggccgggacttcgtactcctgcagagcgcaggaccgcacccctgaatgcaacctcagcctggaatgttgacacaatcatttggtgtccctttaaattggtatcctatgtacatattggtatctgtaatatgtagagatctcttacaagtctaaaaggaagatagggctgggcacagtggctcatgcctgtaatcccagcactttgggaggccgaggcaggcggatcacctgaagtcagaagtttgagaccagcctgaccaatatggtgaagccctagcccataaggacgcagctctgggctgccctcggggttgcgtgtacctgagtccccacccacatctcaccacttagcttgtctgcccagtctttcttaacacatttacaagcagatacatcattggtgggaaaacagaacactttaaaatatgggttcagctttgatttcaaggagaagctgcaagctgtgtgaagggctgggaagggcaccacaggagacgcagctcagcctcttcttcgtcctcagcaactcagctctgaccccaagtttcaccccatgcagcaagggctctgagccctcctgggcccaccatccttagaaagcagcttaggggagggaagtcttattgtccccactgcaaattatttctttgaggaaaagctactagtttccttctcaatgcctgttctcagggtatcagcgtgaccagctttgtttaagttgattttccaggctcccctacagttcagggtggccagggacccagttctggcaaatgagacataagtggacgtcactgcaaaaggatctgaggcaggctcctaaaaggggagagactcaaccggctctgcgttgagtcctttgccctccctcttcctgccttgatgcagatgaaaggcttggcactgcagcagccaccttgtatccacgaggcagtaaacctcagccgacagccacctgcttcagatggcagcccaggaaggtgaaaagagactgggttctcgatggcaacttcgagtcacgacagccttagacttctgtgatatgaaaaaacaaccctcatagttgtttaagcctctggttttcagatttctgtcacagctgaagggaatctcaagcagatccttcctctgagcatctgctctcttctcaaggggccttccggtcacatgctttccttcattcccattacatttccgtccaggttctaatgtcctagggatattgtagcacgcctctgcctggcctaacttcaacctccctctggatgtgagaggcagacctcactgtaggaagagggtgaaggaagggtgtcgaataatgcataaggaaccaaggactaatatccatatatacagacccaaacatcaggtgacactgagcgtgtgcatccacagcttctcacacctgccttgtctggtagacaccagctctggatccccagacctctcacctgagctctagggcaaacgcttcccaacatcccccgtggcgggcagcgaggccgggatggtgtggagctgcgcacttccagcttctgggatgcaaggccctgtcaccactcgatttccaggtgtctgcttcacagtgatctgttaaactgccatatgtgttttatgcaccttcctgggttgtgctacagctgataataaaatcatttgagaattttgtgttgttgttgtttgagacagagtctcgccctgtctcccaggctggagtacagtggcgtgatctgggctcactgcaacctccacctcccgggttcaagcgattctcctgcctcagcctcccgagtagctgggactataggcatgcgccatgacacccggctaatttctgtatttttagtagagatggcgtttcaccatgttggccaggctggtcttgaactcctgaacacaggtgatccacccaccttggcctcccaaagtgctgggattacaggtgtgagccaccgcgcccggacatttttgagaatttttaaaaagagtctatcagaaccgagctcggtggcttatatctgtactcccagcactttaggaggcctacctaggtgggtggatcatctgaggtcaggagtttgaaaccatcttggccaacatggtgaaaccccgtctctactaaaaatacaaaaattagccggctgtggtggcgggtgcctgtagtcccagctactggggaggttgaggcaacagagcgagactctgtcttaaaaaaaaaaaaaagttcaccaccatgcttggtttggccccatttggacgggaggggagagcagtgaagcagccggcacgtgaggtggcctcccggggcagcagagctggcagggcagggcgggccaggccggagggctctgactgatccttggagctctaataggaagctgcacacccattcactctcttagaatagctgtgcacctgcagataaccagtttctgttgtggtgagtggtagttaaataaataaataagcaggcaaagaacaggcttgtccttactgtgacagtcatttgctgctgtgaaactactatggtctaacacctcccactcactttcctcaatcagtgctgcctgcaatggcaggaactcggggccaaaagagcacctgccctagctcagagctcgggcctgcccaccccaccaccccaccccctgggaccacctgactttgacctctgagaccacatttggcttgcatgcaggcaagttatatgacttctctgagcctcagtttcttctttggcaaagtggggatagtaacagctctcttcaaaagccattgtaagagttggaaatgataagccgggcgcggtggctcatacctgtaatcccagcagtttgggaggccaaggcgtgtggatcacctgacctcaggagtttcaagaccaacctgaccaacatggtgaaaccccgtctctactaaaaatacaaaactagccagcatggtggcttatgcctgtaatcccagcattttgggaggctgaggtgggtggatcacctgacctcaggagttctgagaccagcctgaccaacatggtgaaaccccgtctctactaaaaatacaaaattagcagggcatggtggcacatgcctgtaatcccagctatttgggaggctgaggcaggagaattgcttgaacctgggaggtggaggttgtagtgagctgagatcacgccattgcactctagcctggggaataagagtgaaactccatctcaaaaaaaagaaaaaaggtcggaaatgatgtattttagccgcgcagatagtcagccatacgcctgtttcacttatgggtagaaacactgcagttgacttcatttcagcagctgaggggcccagaggactgtgtcctctgcctcactgtgcaggcctcagtcatgttcctggcaaatattccagaaggctcagaggaggcgtgttgagagtgttgtcagccaatcaccacaaagctgctccttcaggagccttctcactctgaacctcacataacacaagcctgtggctggagggagggtggcaggggcctacctgggcattacttccacgcttgcagcctcagggtaaccctggtggtcagataagcaaagatcagcctcaaagcagcaaataggaccatgtcctctggggccttaccatggtccgcatgcagtccaggcttggcttcaccatttgcatgagagctcagaggacacccatggccacagaggcttagctcagccaggggaatggagacagtcagtaacatggaggtgagatcatagcaaacaccttcatctccggttcaagggggaaggggtcacctgctggggaaggaggaggctctggcaggtgacgctgagctggaacgtcgaccaccttcctcacggccttggcagtgaattccagatgcccagacctctgcaaacaacttccagcaaatgcagcgaggacagcagggcacctactgttgactcaaaaagacacttccaggtttccccagaaaaggcagcctttgctgctgcagcccctgcggatgacggcttgtttaatagctcagattccccaggcagtttctccaccctccgctgctgggattcttgcaatggcgatgtggtgggtcggcctggagagggtgggtcaggaaggatcttctgacttggagacttccaggggagacaacaccacacacaaggccctgctccagacttggcaaggatgatgccaaatacgcggaggcagctgcaggaggagcttgttcccaggataaagaggtggtcagctggccaggtacagtggctcatgcctgtaatcccagcactttaggaggctgaggtgggcggatcacctgaggttgggagttcgagaccagcctgcctaacatggagaaaccctgtctctactaaaaatacaaacaattagctgggcgtggtggcaggcgcctgtaatcccagctactcaggaggctgaggcaggagaatcacttgaacccgggaggtggaggttgcagtgacccgatacggtgccattgcacttcagcctgggcaacaagagcgaaactccgtctcaaaaaaaaaaaaaagaaagaaaaacaagctgggtgcaatggctcacgtctgtaatcccagcactttgggaggccaaggcaggtggatcacctgaggtcggaagttcgagaccagcctgaccaacatggagaaaccctgtctctactaaaaatacaaaattagccaggcgtaatggcgcatgcctgtaatcacagctacttgggaggctgaggcaggagaattgcttgaacgcaggaggcggaggttgcggtgagcagaggtcatgccattgcgctccagcctgggcaacaacagtgaaactccacctcaaaaagaaaaagaaaagaaaagtctacagtataatggtaagaaatgtaagcgtgtcagattctgtttttagaacggaagcataacagatccaccgaaagcatcctgtgtttggtgttccctttcctacctgggttcctcgcccacccaggcatgactgcgctcctgaatgtatggtgtatcagtcccctgcatgcttttatacctctgctgttcatgcgtggatctgctagggttgcttggcatgtttttttgttgtggtaaaatatacatggcataaaattttctatcttaaccacttttaagtgtacatttcagggacattaagaacattcactttttttttttttttttttggaaacagagtcttgctctgtcaaccaggctgaagtgcagtgacgcaatcttgactcattgcaacctcggcctcccaggttcaagtgattctcctgcctcagccttctgagtagctgggattacaggtgcctgctaccacgcccacctaatttttgtatttttagtagagatggggtttcaccatgttggccaggctggtctcgaactcctgacctcaggtgatctgtccaccttggcctccaaaagtgttgggattacaggcgtgagccaccgcacctagccctttttgtttctcttcacttttgtcctactcctgtcaaatttttctttttttttttttgagacagagtctcgctttgtcgcccaggctggagtgcagtggcgcaatcttggctcactgcaacctctacctcctgggttcaagcagttctcctgcctcagcctccccagtagctgggattacaggtgcctgccaccatacccggctaatttttgtatttttagtagaaacagggttttgctatgttggccaggctggtctcgagctcctgatctcaggtagtctgcccccctcagcctccaaaagtgctaggattaccagtgtgagccaccgcacccggcctcaaatttattgattctcttactgctcgaacccaggaggtggaggttgcagtgagccaagattgtgccactgcactccagcctgggtgacagagcgagactcagtctcaagaaaaaaaaatgtattgagtctcttttattactttttctagttttatttctttatttgtttattgttcatacatttgtttgtttgtttgtttgggcttggaagtgatggatttcattcctagtctctcatgcttccctccatccacatttttcacatgcgcactgaattacagaatctaaagctaatcagaaattgtcccctgcaggaggaaaggcactctttagctctgatcacaccttctgtcttacagactgtcactcggcatcacaggctgactttgttttcatgcctccaaccaatcatcgtcattgctgctgtggttcccaccatcagtgcttctgtggacttacccacatgtttaccagtttctttgctcttcattgctttcattgccctctcactccttttgaggtcaatttcctttctcttaacaaaaatgtattagcagctctcttgctgatggtactttaggataaactctttcaaaagtcttcctctgaaaagaccttgttttaatttttaaattttgttttgttttagaaaattttcatgtggagcctcccattgatgaaaaaatctccatttcacttttactcgttgtggtgcattatcaacaaagatggccaccaacagttttgttcatccctgtaatgtcactcctcccatcaagaagtggaatgtggccgggcgcagtggctcacacctgtaatcacaccactttgggaggccaaagtcggcagatcacatgaggtcaggaatttgagagcagcctagtcaacatggtgaaaccccatctctactgcaaatgcaaaaattagctgggctactcagaaggctgaggcaggagaattgcttgaactcgggaggcggaggttgcagtgagctaagattgcaccactgcactccagtctagctgacagagctagtctcctctcagaaaaaaaaaaaaaaaaagaagtgaaatttatttcctttcgcccctccccttaaatctgggccagccttgtgactcactttgactagtagaaggtggaagtgatattatgccaggtccagacttaggccttaggaggcctggcagtttccattttcaccctcttgggatccagccactatgaaaccaagttcacctgctttattggagagagaaatgacctagaagatgaaagacagcaaagggagagcaggatgcccagccagccaccagccattctgaccccttcagctgaggcactgcatgggtgagtgaagctgtgggatctcacagtcccagttgagccacctcagccaaaacatcacataagaacacagatgagccgtcccaactgagccctgccaaactacagaattgtgagcaaataaatggtggtgggtttttatttatttatttatttatttatttatttatttatttgagacatggtcttgctttgttgcccagactggagtgcaatggtgtgaccacagctcgctgtagccttgacctcccaggctcaagtgatcctcctgcctcagcctcctgagtagctgggactacagtcatgtgccaccacatctagctaattttatacatttttttatagagatggggttacactgtattggccaggctggtcttgaactcctgggctcaaggaatcttcctgcctcagcctcccaaagtgctgggattatagacatgagccactgtgcctggctggtggtggttgttttaagtcactaaattttaaagttatttgttatggagcaataggtaaccaaaacactcctgaatggaattttgacatggggaggggggtggaattctaggatgagttattccttgtcagcactttgaatttgtttttatttatttatttatttttttgagacagagtcttgctctgtcgcccaggctggagtgcagtggcgcaatctcagctcactgcaagctctgcctcctgggttcacgccattctcctgcctcagcctcccgagtagctgggactacaggcgcccaccaccacgcccagctaattttttgtatttttagtagagacggggtttcaccatgttagccaggatggtctcgatctcctgaccttgtgatctgcccgcctcggcctccagaagtgctgggattaccggtgtgagccaccacgcccggcagcactttaaatttagaattccactgatctctgtcttcttttgctttgcaggtaatctttcaggttttttatttttgtttatttattttttgagatggagtctcactctgttgcccaggctggagtgcattggcacaatctctgctcactgcaaccttcacctcccggggtcaagccattctcctgcctcagcctcccaagtagctgggactctaggcatgcgccaccatgcctggattatttttgtatttttagtagagacagggtttcaccatgttggccaggctggtcttgaactcctgacctcaagtgatccgcccacctcagcctcccaaagtgctgggattacaggcatgagccaccatgtctggcccctcaggttattttttaaatcatctctttgtcttcagtgttattcggtttctctaaaatgtatttaacatagtcttatttattctgctccagaattgttgtgctgctatacctccgccttcttttcctcttttctttcttttttaatttttatttttgtagaggcagtgtctcactttgttgcccagggcggtcttgaactcctgggctcaagagctcctcctgcccaaagtgttgagattatagggataagccaccactcctggccccctcctttttttcctggaaatttttttggtgcttatgatgtgcagtaataaaaatacgattttaagtgttggggattaaatagtgaacaaaaaagagaaagtcactatcctcatgatagtgatattttattttattttatttacattcacagtgcttggttcacagcacatatgctaaaactggaacaatacagagaagattagcacggccccagcacaaagatgatgtgcaaattcatgaagtgttccatattaaaaaaataaaataaaaatagcaatacatttacattttattttatagcgacagggtctcactatgtttcccaggctggttttgaactcctgacttcaagcgatcctcccgcatgagccaccatgcctggcctaagcttacattttagttagagaaagagcctgggaatgaagctagcatggagaagagcagagctgagatttaaagggagcagatcctgaagcctggttgaaagctgcatcgtttcccacctgaattcaaccacattcattttcagtaacacgagcagtaactgcttcttgttgtttaagccaatttaaatatatttctatgtcaattacaaatgaaagggtattaactgttaggtgcccagcctcagcctaatctagatgttctttctctgcaactttgtatcttcacttaattagtttacttgaaaattaattaaattaggcctggtgcagtggctcatgcttgtaatcccagcactttgggaggccgcggcgggcggatcatgaggtcaggagatccagaccatcctggctaacatggtgaaaacacgtctctactaaaaatacaaaaaattagcccggtgtggtggcatgcgcctgtagtcccagctactggagaggctgaggcaggagaagcacttgagcccaggaggcagaggttgtggtgagccgagatctcgccactgcactccagcctggcgacagagcaatactccatctcaaaaaataagtaaataaaataaataaataaataaaaacactgacacagtggggatgaagtttcaatgtaaattgcagagaggacaacattcaaaccatggtacctagtcatagtattttactcttttcttatgcttttaattcctgaagtatctagactttctaatcctattttataatacctttgtagtccttatataacatctgtgttttggtatttgtttcaggttttttcctaagtatgtgtcaagatcccattttccaagtcaaaaatgggattttgctacacattatttcataacctgctctttgtttttcacatgataaggaacttaaaacaacacacatctttttctgagggcagaaatttgggcccagctcacctaggttctccgcttcagagctttaccaggctgctgtccgggtgttggctggggctatggtctcatctgaggctcagctggtctcatctaaggcttaatattggcccccaagctccctcagactgttggcagaattcttctccttatggttgtaagactagaactggggttcatgttttcttgttggctgtcagccagggatggcccttagcaactagagactacagtagttccttgttgagtggccctgtcaccacagagaagcttacttcttcaaagccagtaatagacggagagtctctgaccctctgagagggcccagacactctttcaaagacttccacctgatttagtcaggcccacccatgaaaatgcccccttgacttcaaaatcaactgacttaggaccttaattatgtctgcaaaaccccctcacctttttcacagtctattagctggaagtaagttgcaggtcctaccggcgctccaggggaggaggttacacagggtgtgaacaccagggagtgggaccacagggcccatccctgggtctattcataccatgtttacctttccatgtcagtatcttttcttttcttgttttttttttttttcagatggagtctcactttgctggcccaggctggagtgccgtggccccatcctggctcactgcaacctctgcctcccaggttcaagtgattctcctgcctcagcctcctgagtagctgggaccacaggcatgtaccaccacacctggctaatttttgtatttttaatagagatggggtttcgccacgttggccaggctggtcttgaactcctgacctcaggtgatctgcccgcctaggcctcccaaagtgctgggatttacaggcacgagccaccgtgcacggctgttactatgttttctaccaccttctaatgttaatggcctcacagcattctactatgtggatgtgtcaacatttatttaattatttatttatcactaagcactgaataaacataaacattttagtttattcctttttttcttacagacagcgctggggagaatgaacgcctgagtactcatgtctttatgcactgtagtattatttccttacaacagactcctgaacctggaacggcagtgtcaaaggattcacaaaatgttagacttctgaagcaaatcagatggcaccttttttgaataatgaagagtctttacccctggcatgaggagctgaggacaactcccactccacgatgtgaagccacagagtttcgaggtagtggttaatggtggttgtgatttttttgtttttgtttttgagacagagtctctgtcacccaggctgggagtgcagtggcacaatcttggctcaccacaacctctgcctcccaggttcaagcgattctcctgcctcagcctcccgagtagctgggacaggtgcccgccaccatgcctggctaatttttgtatctttagtagagacgaggtttcaccatgtttgccaggctggtctcgaactcctgacctcaggtgatccacccgccttggcctcccaaagtgctggaattacaggcgttgagccaccacgcccagctggttgtgatgttctaatttggacttggaagtcaaataatcgccccatgccctgtggttgctgtggttgcatgccctgccccggtggaagctggggaagtgtttcctgtctgtcatcccacccattcacgtgtccttattatgggtgaagcccagagagcgagagctctcattgtggccaaggctgcagccttgccactgtcacggagcacagctcacgtctcctctgagccgttattttgtttgtatgaacccagaatgtatgtaaattctgatggggtaagcgggcagacaaaaaggtcactgaagtgtcccaaacagaatctcattgtgtactggagaggaggcaaaataatcacttgccagagggcggagcttggttttgtgggacctgaagcttaaataatttggggaggcctctttaagaaaaagaatcaaattatgaatacaaaattaggatgagggtgtttgaagggcctcatgcaagtgcggtgcctgggacttcagcttcattaacttcgcgttcagtctacgcctgcttgccagtggactgggtttgtcctgcttggagtctggttttgtttgtttccaaacttattaaattagatgtcttttcttctttccttttgcatttgcaagtgtattaacatttaagaattgagcaggccttcaataatatagcttctctctctctctctctctcttttttttttttttttttttttttttttgctaagatgactctaacccctccctgcttcaaatcacgaacttgcattataggcacacaaaggatgctgactccctccagcagcctcgtttgcagtacggagcctggggcccttaatgggataacagggaaatggggaactggaaagaatcttccagcagttgagtctgtctgccccaggcaccatgttagatgattacattgtgttccttcgcccttttgccagggtgacgggcaggcactcccaggctctcctcaaaacagctccgattttaagagggaaaagccaggacaccacaagttgcagttcaaatatgaaactgttagcagagtcattttggcataaaacccactgtattagttggtctcccaccaggaaacagatggcatattcaaaataggatcattggaggagagtttatttgcaaagatgtgggtgtcggggaaccacaaaggatggcgcagtaatccagagtttagcagcagccaggcggtgccctcacgaagcttgaagggatgaaggggagaacagtccctggcacccacagggagagagcggtgctgcgaggccccaggaagagaagatgtcattgtcccttgagggatacagccagccagggaaataaacaccctgacctccctctcctgtctccctctggccacctgccacgggagttggtggatgtggaccacactggtcagcctcagagggcagggtggagatggtgagggggtgcatacggaggggcaaacaaaaggtaaatagcccagcccagccctttggcctctcagcacccgctctagacttttgtccaggtgaagagcttgttcgcctaacacaggggatctataagtcgtaatagctaccatatcattgtggactgatgtcagctggtcatactctcagctgaaatcgccggtgttcctcagttaaggtaatgagtaaaacggggtgcaacggagtgaattttttttttaagatgtttcttgctttgtcccctaggctggagtgcactggcatgatctctgctcactgcaactgctgcctcccagtctcaagtgactcctgcctcagcctcccaagtatctgaggttgcaagtgcacacccggctaatgtttgtatttttagcagagacaatgttttgccatgttggccagactagtcttgaactgctgatctcaaagtgttgggattacaggcgtaagccatggtgcccaacccaacagagtgaatgtttacgtctcctcgcaattcctgtgttgaaatgctgaccctcaaggggatggtgtgagatggggcctttgggaggtgattagggtacgaggatgcggtcctcatgagtgggatcaggttcttataaaagaggccctagaggaatcctttgtgccttctgacatatgaggccacatgaagaagatgctggttatgagccatgaagcaagccttcaccagacgccaaatccgctggctcctcgatcccctcgatctgaggcttcccagcctccagaacggtgggaaataaatttctgtgatttatgctacacccagtctatagtattctgttacagtaacccagatggattaagatggagaatggattgagatggggaagaaaaaaagccccaaattcatgaaatgtagctgctacagtccccacctccttagctgtccccaaaacctaagcaggtaatcataacttccattctgtgctcaccttacctctgctggcacctttttggacagggttctctacttggcgaggtgacccaaatcttcattcctgcagggtctgagtcctcggccgctgcgatcgtttgaacattgtttgtccccaccgaaactcatcttgaggcttggtccccactgtaatgatgttgagaggtggcgggacatttaaggggtgtttgagtcatgagggatccagcttcacgaagggattagcgcaggagtgcgtgagttcttcttgtgggactcgattgattactgcagttgccagttgttacaaagcaaggctgcctctggccgcgtgccctcttctgcttcctattttctcccatgctagaagcagcacaaggccctcaccaaatgtggccatccattttggacttctcagcctccagaagcgtgggctaagtaagcccctttcctttgtaatttacccagttggactaagacaggtgttttgttatagcaatggaaaacagactaagacagttgcattgtatttgggggtggccacagttttccattgactaggactgttggactaggagtgctccagtgatgtctctgatttcagacactgtcttcctcgccccttttcaacagcagcaatccagtttcatcctgtgatcagggtccatcctctacctactaccataacccctctctttgcttcttggtctatggcatgcagagccccaaatgagcagggagtagcttcaacttccgattcatcagaagcatgactgtttcctctaacagcatttcttttctaggccccaggacctccagcgtcaatgttgtgggatgatgggtgacagagccaaagcatcgccatcttggacaagcacggtcattctgaagttccccttgatcaaaaactgcctaaacccaaaggatatcagcctgatggctaaggtcagcatgaccataaaccataaataacatctctgaccaggaacattccaaacccctccatgagacatgccagccctgagataacctcccctccggccagaaagatgtcagacccaagataacctcccctccgaccagagacatcccaaccctgccataaacttctcccccacacagaaacattctgagcttgtaataagccccctcatcctaaaaccaatatatactcttagtccgtaagagaaagtgctcctgaacaaaattggccagaagcccctctccggcttattttctctaaaatacatctgtcgttaaattgagccacagttcgtgtttcttccctctttctttaactcttacaatgggaagcaaacttttttagtgggttattaggaataatagtgaaaagcataattctcctctccaggccttgcttcctggacccacacatctcacctgtggggaagatggaaccatatattggccactggtttaatgtacaagatgtgtctccagtcccaatggtagacatcctatagccaagactccatccaattgcctgacctccacatgtccctactctgactggaaccttgtgggtagtttaggtctctgaggatcagtcaagctcagagcaagattgaataacccctggaaggtgtggatattcctatttccccaggatcagaggcatatttaccataaagctaatgatgcttatgcttcaagactgctcacttactaaagccctggtgttaacatgatcatatgcatttataaaatttgcaaacataaaaaattttttagttggactttattttttttttaatatttttcatttttcgagatggagttttgctcttgttgcccaggctggagtgcagtggcacgatcttggcttgccacaacctctgcctcccaggttcgagggattctcctgcctcagcctcccgagtagctgaaattagaggcatgtgccaccatgcccggctaattttgtatttttagtagagatgaggtttctccatgttggtcaggctggtcttgaactcctgacctcaggtgatccgcccacctcggcctcccaaagtgatgggataacaggcatgaaccactgtgccccacctggactttattttttattatttattgattttttggagacagagtcttgctatgtcgctcaggctggagtgcaatggcagcactgcctcctgggttcaagagattctcacctctcagcctcccgagtagctgggactgcaggggcacaccaccaagcctggctaatttttgtacttttttttttttgagacggagtttcactcttgttgcccaagctggagtgtaatggcactatcttggctcattgcaacctccgcctccttggttcaagcgatcctcctgcctcagcctcccgagtagctgggattacaggcatgtgccaccatacccggctaattttgtatttttagtagagacggggtttctccatgttggtcaggctggtcttgaactcctgacctcgtgatccacctgcctcagcctcccaaagtgctgggattacaggcgtgagccatggcacccggccttttgtacttttttagtagagatggggtttcactgttgttggccagtctctctcaaactcctgacctcaagtgatctgcccgcctcagcctcccaaaatgctgggattacaggtatgaaccactgaacccagccccccgactttatttttgagacaggatctcactctgtcgtccaggctagagtgcagtggtgtgatctcggctcactgcaacctccacctcccagttcaagcaattcttccgcctcagcctcccgagtagctgggactacagatgcacaccaccacaccaggctaatttttttgtattttttggtagaggcagggtttccccgtgttggctaggttggtctcaaactcctggcctcacgtgatccacctgtctcggcctcccaaagtgctgggattataggcgtgagccacagcacctgaccagactttatttttttattattatttttagagatggtgtctcaccttgttgcccaggctagagtgcagtggcatgatcctagttcactgcagccccgacttcctggggtcaggtgattgtttcatctcggcctcctgagtagctggggcaacaggtccataccaccatatcctgctaattaaaaaaaattttttttagcaacagtctcactatgttgctcaggctggtctccaactcctggcctcaagtgatccttctgcctcagcctcccaagttgctgggatcataggcatgaactaccatgctgggctagttggactttattgaaatataatgttacacaaaataaattgcacaagattgaggcatattaatggcaatccctgcctctttccactctctattaccttctctctcatctttccttaaggcactagaatggttgtagttattttgggggaccatctaaaggaaaattgaggtggagatacatctgtttgggtttattgagttttgtttgtttgtttgtttgtttggagatggagtcgcccaggctggagtgcagtggtgcgatctcggctcactgcaacctctgcctcccaggttcaagcaactctcctgcctcagtctctcatgtggtacattttttgtattttagtagagacggggtttctctgtgttgcctaggctggtctcaaactcctgacctcaggcaattcgcccgcctcggcctcccaaagtgctaggattacaggtttgagccactgcgcccggcggagatatgtttatgtagatatttgtatgaagttcacagtcactgctgtgtgtagttaagtaattggtaacaattctggtatagaaatggcttccaaaaatactctacacagtaggcacacctactgtgcctatcatccagtactgcaacatgaatgcaggttataagtagtcttcaaatatgaacctggcttacagtccctggcactgaaaatacaggtaatggaagggaaccaagctttgaaacgtatggagccataagttaaactatagaagatgcttccaaatattatggggttcacacctgtaatcgcagcactttgggaggctgagacgggaggatcacttgagcccagggttcaagaccagcctgagcaacatggcaagaccctgtctctatattaagaaaaaatttaaagctgggggtggtggctcatgcctgtaatcccagcactttgggaagccaaggcaggtggatcacctgaggtcgggagtttgagaccagcctaaccagcatggagaaaccctgtctctactaacaatacaaaattagccaggcatggtggcacacgcctgtaatcccagctactcgggaggctgaggcaggagaattgcttgaacccgggaggcagaggttgctgtgagtcgagattgtgctgttacactccagcctgggcaacaagagcaaaactccatctccaattaaataaataaataaatttaaaaattaaaacagcaacaacaacaaaaaacaaatcttacagctcatatatgaaagaaacctgatcaagatttccccaacattgacaacaactctaaaattgcacttttccaataatgtgttagaagctgaaacttttctagactataactttaaaacaacaattttttttaataaaaaaaatttttttgaaacaaggtctcactctgtcacccaggctggagtgcaatggcgcgattacacctcactgcagcctagacctccctagggggctcaagggatcctcccacctcagcctccccagcaggtgtgcaccaccacacccagctaatttttatagagacagggtttcacaatgttgcccaggctggtctccaactcctgagcaatcttcctgcctcagccacccaaagtgagccactgcgcccagcatttttttttttttttttttttttttttgagacggggtctctctgttgccctggctggaatgtagtggtgtgatctcggctcactgcagcctccaactcccaggctcaagtgatcctgttaccagaaaggggtcccaaaccagatccaaagagagggtccttggatcacgagcaagaaagaatttgaggcaaatccatagagtaaagtgagagcaagtttattaagaaagtaaaggaataaaaaatggctattccataggcagagcagcaagcagcatgaacttattacttcttgattatatgctagacaaggaatagattattcatgagttttcggggaaaggggtgggcaattcccggaactgagggttcctccctctttttaaaccatatagggtaacttcctcacgttgctacggcatttgtaaactgccatggtgttggtgggagtgtatatatgctaatacatacatacatataattagcatataatgagcatgaggatgaccaaaggtcacttccatcgccgtttggttttggtgggttttggttggcttctttactgaaactgttttattagcaaggtctttgtgacctgtatcttgtctgacctcctgttttatcctgtaactaagaatgcctggggctggacgcggtggctcacgcctgtaatcccagcactttgggaggccgaggtaggcggatcacgaggtcaggagttcaagaccagcctggccaacatggtgaaattctgtctctactaaaaatacaaaaattagccaggcatggtggcaggcatctgtaatcccagctactcaggaggctgaggcaggagactcacttgaacccgggaggtggaggtgcagtgagccgagatcgtgccactgcactccagcctgggcaacaagagcaagactctgtctcaaaaaaaaaggaatgactgaacctcctgagaatgaagcccagtaggtttcattttacccagcccctattcaaaatggagtctaggccaggcgtgctggctcacacctgtaatcccagcactttgggaggctgaggcaggcggatcacaaggtaaggagtttgagaccagcctggccaatatggtgaaaccccgtctctactaagaaatacaaaaattagccagacatggtggtgcacacctgtattcccagctactcaggaagctgaggcaggagaattgctggaacccaggaggcagaggttgcagtgagccaagatcacaccactggactccagcctgggcaacagagtgagactccatctcaagaacaaaaaaacaacaaaaaaaccccaaatggaatctaaagttcaaacgcctctgacatcttaggaagccgaagcaggaggatcacttgagcccaggagtttgagaaaagcctggacaacatagtgagacactgtctctataaaaaaaaatttttaattggccaaccatggtgttgcacactggtaatcccagctactcaggaggctgaggcgggaggaccacttgagcccagcaggttgaggctgcagtgagctatgactgcaccattgcactctagcctgggcgacagagcaagacctcatctctctaaaaaagagaaaataaataaatagtatttgctttatttacaactgtttatttgtcattttgggttattttattaaaaaatggtacctcaaattgtattagtctcagggccttgtgaacccaaaagtatctgagacaggtctcaatcgattttgaaagtttattttgctgctgggcgtggtggctcacgcctgtaatcccagcactttgggaggccgaggtgggcagattacaaggtcaagagattgagaccatcctggccaacatggtgaaacctcgtctctactaaaaatacaaaaaataaactgggcgtggtggtgcgtgcctgtagtcccagcttctcaggaggctgaggcaggagaattgcttgaacccaggaggcagaggttgcagtgagctgagatcacaccactgcactccagcctggtgacagagcaagacttcgtctgaaaaaaaaaaaaaagtttattttgcaaaggttaagcagggcccatggcacagtctcaggaggccctgatgacatgtgcccagggtggtcagaatacagctgaagtgggcggatcacctgaggtcaggagtccaagaccagcctgaccaacatggagaaaccctgtctctactaaaaatacaaaattagccgggcatggtgacacatgcctgtaatcccagctactcaggaggctgaggcagaagaatcgcttgaacccaggaggcagaggttgtggtgagccgagatcacaccattgcactccagcctgggcaacaacagcaaaactctgtctccaaaaaaaaaaaaaaaaaaaaaaaaaaaaaaaaacagttatcagtaaaaaaggaatgtctgggttatgataagtggatgtggagatcaaggttttatcatgtaaatgaagcctccatgtagcaggcttcagagagaatagattgtaaatgtttcttatcagaggtaaggtttgtgttgatgttgatgctggagggataatgaggcatgtccaacctccttttctatcatggcctgaactagtttttcaggttaactttggaatgtctttggccaagaggaggggtccattcagatgattaggggggccttagaattttattttttatttacagcccccaaacccacatctgcccctgcacacagtgactgcccccgttaccctggggaatggctgcagatccctctgtgcatatggggtgggagggtgagggcgtggggaagagtcacaggttacctgtggcacattgcagggtccttcccaaaggggcctggcctgtctcaggccacaggccctggatccctgcactagcttagctctgaggcctgtgtaaaaggttgtgaaaccacactgcagtgacttgattttcagggttgccccatcttttggcttccctgggctgctctggaagaagaattgccttgggctgcacataaaatacactaacgatagctgatgagctaaaaaaaaaaaaaaatcacaaaaaaatctcatgatgttttaagaaagtttgagaatttgcattgggccgcattcaaggctgtctcgggacacatgcactctgtgggctgtgggttggacaagcttgatttaggttttgttccaccagactggagtgtttcatcctgcctgtgtctagcagcatgttagaaggctgcattctcttagcagagaccctgtgattgagacagagcaggattcctccttagaggcctgtggctgctcccccgaccaccccagcatggaaataaaacaaaaaccttgagttccttccttcaagggaaattccaggcacctagctgaccttgagaagtaaatgagcaacttgataagccagaaagtgtgaaaggaagaataaaatcttgggagcccaaattcactatgccaaaaaggaaaagttaagtgtggaagctgagtcacgggagggggcgggaacaagtgcctttccttttgtttctaaactgatagctgcagatggaaggccacaggtggcctccttcaccctgacaatgtaaattaacagcttatctttgcaggcgggggatgagggtaggtaagggacaagaggagactagaaatcatcgtccccacccactccaagataaatgcatatttgactgtttcctgtactctgtttattttgtcttatgtaaagtgccaatttaccatgtgagatgaatacagaattgactgttccttctacccaccgcccccacccccttttttttttttctttttttgagacggagtcttgttctgtcacccaggctggagtgcagtggtgtgatcttggctcactgcaacttctgcctcccgggttcaagcgattctcctgcctcagcctccccagtagctgggattacaggcgtgcatcaccacgcctggctaatttttgtatttttattagagatggggtttcgccttgttggccaggctggtctcaaactcctgacctcaggtgatcctcccacctcggcctcccaaagtgctgggattacaggcgtgagccaccgtgcccggccttctactccctttttttcctgtgcaacatgtggattcagtgagcctaaacaaagccgcaaaacaaagtgaccatatcctccctcttttttttttttttaatgttccctttcccctcctgcctgctttttcccctttactttttatttttattttttgagatggcgtctctctctgtcacccaggctggagtgcaatagcgtgatcttggctcactgcaacctccgcctcccaggttcaagcgattctcctgcctcagcttcctgagtagctgggattacaggtgcatgccaccacactcggctaatttttgtatttttagtagagacagggtttcaccatgttggtcaggctagtctcaaactcctgactttgtgatccagctgcctcggcctcccaaagtgctgggattacaggcctgagccactgtgcccggccactttcatgcacgtccgtgtaaagagaccaccaaacaggctttgtgtgagcaataaagcttttaatcacctgggtgcaggcaggctgagtccaaaaagagagtcagcgaagagagataggggtggggccgttttataagatttgggtagataaaggaaaattacagtcaaagggggttgttctctggcaggcaggagtgggggtcacaaggtgctcagtgggggagcttttgagccaggatgagccaggagaaggaatttcacaagacaatgtcatcagttaaggcaggaacgggccattttcacttcttttgtggtggattgtcatcagttaaggcagcaaccagccatctggatgtgtacgtgcaggtcacaggggatatgatggcttagcttgggcccagagggctgacattcctgtcttcttatattaataagaaaaataaaatgaaatagtggtaaagtgttgggatggcgaaaattttgggggatggtatggagagataatgggggatgtttctcagggctgcttcgagcgggattaggggtggcgtgggaacctagagtgggagagattaagctgaaggaagattttgtggtaaggggtgatattgtggggttgttagaagaaacatttgtcatttagaattattggtgatggcctggatacagttttgtatgaattgaaaaactaaatggaataagagaaggagaaaaacaggtataaaaggtctaagaattgggacgactcaggacatctgattagagagtgcctaaggagattcagcatagtcctgccagcaaagattatttatttacttcaagaggtaagagtggcagtttggggatagcaccaggagatatcagctgtgatggcttagagaaacagtgtaaaccggcagtgtaaacaagagcagagcatgtatgagtagttgagaacggtgaataggagtatgactagacagaagatagtagggatgacaagtttttttgggggcacggtggaagttggtctgatgtctggaatgagactggggcctaataaaaaggagcatctatacaggagctcaaatgggctgtaccttgtagcattctgaggacatgtctgacttctgagaagggaaagtggtaaaagtattgtccagtcctttttaagttggtggctgagcttggtgaggtgtgtttttaaaagacctttagtccgttctacttttcctgaagacacaggacagtaagggatataaaggtttcactgaataccaagagcctgaaaacctgcttggctgatttgactaataaaggctggtctgttaacagactgtatagaggtgggaagactaaactgaggaattatgtctgacagaagggaagaaatgactgcggtggccttctcagaccctgtaggaaaggtctgtacctattcagtgaaagtgtctacctagactaagaggtattttagttatctgactcggggcatgttgagtaaagctaatttgccagtcctgggtgggggcaaatcctcgagcttgatgtgtagggaagggagggggcctgaataatccctgagggatagtagaatagcagatggaacactgagaagttatttccttgaggatagatttccacgatggaaaggaaatgagaggttctaagaggccggctagtggcttgtactatagcataacctgcctttgctggtgtgtggcgattaggcctggtggaaaccaccatcaataaatcaagcgtgatcagggtgaggaacaggaaagaaggaaatatggggaaattgggtgaatgtcaggtggatcagagagatacagtcatgggggtcaggtgtggtatcaggaataatgtgggaggccggattgaagtccgggccaggaacaatggtaattgtgggacttaacaacgagtgagtacagctgaaggagccagggagcagaaagtatatgcgtcaggtatgaggaagaaaatagattttggaagttatgagaaatgtagagagtaagttgagcatagtttgtgattttgagggcctctaaaagtattagggcggcagcagccgctgcacgcagacatgagggctaggctaaaacagtaaggtcaagttgtttgcacagaaaggctacagggtgcggtcctggctcttgtgtaagaattctgaccgcactaaccatgcctaggaaggaaaggagttgttttgtaagggattgaggtttgggagattaatcagacatgattaacagggagagcacgtgtgtttttacgagaattatgccgagataggtaacagatgaggatgaaatttgggcttgactgaagtaatgggggctgtctatgaagccttgcggcagtacagcccaggtaatttgctgagcctgatgggtgtcagagtcagtccaagtgaaagtgaagagaggctgggatgacgggtgcaaaggaatagtaaagaaagcatgtttgagatccagaacagagtaatggattgtggagagaggtattgaggataggagagtatatgggtttggcaccatggggtggataggcaaaacaatttggttgataaggcatagatcctgaactaacttgtaaggcttgtctggttttaggacaggtaaaatgggggaattgtaaggagagtttataggctttaaaaggccatgctgtagcaggcgagtgataacaggctttaatcctttcaaagcatgctgtgggatgggatattggcattgagccgtgtgagggtgattaggttttaatgagatggtaaggggtgcatgattggtcaccaaggagggagtagaggtatcttatacttgtgggttaaggtgggggaatacaagaggaggacgcaaaggaggctttggattgggaagaagggcagcaataagatgcagctgtaatccaggaatagtcagggaagcagatcatttagttaaagtgtctcagcctaataagggaactgggcaggtggggataactaaaaggagtgctcaaaagagtgttgtctaaattggcagcagggttggggagttttaagaggtttagaagtctggctgtcaatacgcacagcagttatggaggcaagggaaacaggcctttgaaaagtaggtaatgtggagtgggtagcctccgtattgactaagaaggggaaggacttaccctccactgtgagattacttaaagctcggcatccgcgatggtctacggggcttccaaggcgatcaggcagcatcagtcttcagctgctaagccgagaaggagtcagtcagagagccttgggccagaattccaggggttctgggagtggctgccaggtgagttaacagtccgatttccagtggggtcccgcacagatgggacatggcttaggaggaatcctgggctgcaggcattcctcggcctggtggtcagatttctggcacttgtagcaagttcctgggggaggaggttctggaggaacgcctggccactgcggtttaggcgtttggaagttcttgtgggctggagatgtggctggggtttgtctcacagtaaaggcaaggaattgcaacttttttctattattgtacaccttgaaggtgaggttaattaaatcctgttgtggggttcgagggctggaatttaatttttggagttttatttaatgtcgggagcagattgggtaataaaatgtatattgagaataatacagccttttgaccttttaggtctagggctgtaaagcatctcagggttgctgccgaacgagccatgaactgggctgggttttttatatttgatgaaaaagagcctaaacgctatctgatttgggataaagaaaaaggagcattaaccttgactatgcctttagctccagccacctttttaagagtaaattgctgggcaggtgggggagggctagtcacggaatgaaactgtaagccggacgggtgtgtggaggggaggtgataaaagaattatagggtggaggagcagaggcttgaaggggtgggttgcccctccacacctgtgggtgtttctcgtaaggtggaacgagagacttggaaaagaaaaagacacagagacaaagtatagagaaagaaataaggggacccggggaaccagcgttcagcatatggaggatcccgccagcctctgagttcccttagtatttattgatcattcgtgggtgtttctccgagagggggatgtgtcagggtcacaagacaatagtggggagagggtcagcagacaaacacgtgaacaaaggtctttgcatcatagacgaggtaaaggattaagtgctgtgctcttagatatgcatacacataaacatctcaatgctttacaaagcagtattgctgcccgcatgtcccacctccagccctaaggcgtttttccctatctcagtagatggaacgtacaatcgggttttataccgagacattccattgtccagggacgggcaggagacagacgccttcctcttgtctcaactgcaagaggcatgccttcctcttatactaatcctcctcagcacagaccctttacgggtgtcgggcagggggacggtcaggtctttcccttcccacgaggccatatttcagactatcacatggggagaaaccttggacaatacctggctttcctaggcagaggtccctgcggccttccgcagtgtttgtgtccctgggtacttgagattagggagtggtgatgactcttaaagagcatgctgccttcaagcatttgtttaacaaagcacatcttgcacaacccttaatccatttaaccctgagtttgacacagcacatgtttcagagagcacggggttgggggtaaggtcatagattaacagcatctcaaggcagaagaatttttcttagtacagaacaaaatggagtctcctatgtctacttctttctatacagacacagtaacaatctgatctctcttgcttttccccacatttcccccttttcttttcgacaaaaccgccatcgtcatcatggcccattctcgatggtcgctgtctcttcggagctgttgggtacacctgcagactaacaacagacaaaacaagcacagaaggattaatatgagatttataattgtagtacttccgatggtcttaacccaagtgacagggttaagatttgcgaggccatcagcaactcctgcaattgcctcagttcctggcaccaaatttaaatgggcttttgatgcttcaaaaattttttcttttaatttggaaatgtctaaagtgagattatcttctcttccctgtagatggtgtctaaccatgtcccagtgatgctcagactcattataaatttggggtgtaatacaaaagtctgacgtattgcagtcacactgtaactggaaacgacgttctaagctcatgagtctgtctcctatccaaatgagtttgtctaagatgattaatttgatttgccaatttttgatcaatactagattgtgaattccacaatcttgtagaattcttttgccaatcattaacaaagtttaccgactgaacagaagagtgcaatgcaactcctgccacagcagccgtagctgtgactgcaattaatcccataatcactgcaattaaagtaaaaatgaatcttttggatctatttaaaatgccttttaatacttcagtcaaaatatggatggatggcgaggcctcccacggtctgtccatggacacagggatccacacgccttctcttgctctcaccagcagaatacgctgctgccaattaaaagttgaatcaatgcaagtaaacaatctacaattttcacaggttatagtttgggagtctggtttaataactatatttcctacaactagcatataagggggctttacgcaactctgtaaaggaaccgttagactggaatttaggtcgatagtataaaatggcttacgatctcttgtttctgaagtttgatttccagaccaaattctaatgtggtgtgaggccacaataagcctccataattctggatgttcaggaccagaaacaggacttattatttttggtcttggggtagagattcctttttctccccattcccaagggtacaaagactgtaattttttatgcttatgtttgtctagactttctgttaagtcgctatcaacagctggactcacttgtgcacttggacacaactgagtttgtcctgagcaattgtgatcgaattgacctcgaggtgcccaatctataatagttccgaattcattgttttgtaatatcaccgcactattggccacacattcttcccaaactaaaacttctgtattttttgattctttgggaatttccttggggcaaggttttcctttaggtctaaattttaatgatctttgataagaaaagtcctgtaaataatttactcgtggcctgagtgacatcccgcttaccatgtgataagtgaatctaccgttaggactgacagtaggtacttctaccaaccaattttggactgcatgtattaaacatcctggtgctctccctaggcaaataggataacgatacccagtggaaatatttatcattatcccttcttcctcaggtttgatagggcagcgatcatctgtggggccaggtacccgtacactatcattaacatatacttctataggattatccatccatgtgactggtgttaccatctctgtggaggcccttttctttgcatctccgatgggttcattgtagaacttcaaatgtctagtgggtatccaaacaggaagctgattttctcctggtgaaacacaagcaaacctctcccccacgttatcaccttccctatttcccatgtcttatttttattatctttccaccaaattagttttccttcatgtgggctgttctttttaccagtaagatgttgttctgcagaagtagtagtctgatttctataaatgtttaaaaaaatttaaagtatagagtgctagattaagttgcatctgaggagtggtacactccttactgtctcccccttctttttgtttaactaattgagttttgagtgttctattagttctttcaactatggcctgtccttgggaattataaggaattc

SEQ ID NO: 11 - DNA, 110847 bp, Homo sapiens
aagctttaagacagtgcttggagcaaagcatcccacaaatatttgctcttattgttgttcttactgttgtggtaaatggagtgaaatggtaaggctgatgtttcccagagtacatcacccctcagaacctttgcccatgtctgtccctctgctcagaaagcctgctctctccctgcttacctggcagccttgcctgctcagccctgtcctagtgtcactccgtgtctttcctgctgattccccactgcccagaagaactgacctcaccttttcctaccccattggcccctgcatgcatggctatcaccgctcatgtttgtttactgggcctccttgagggcagggatgatggcccattcatttctgtatcccagggtctcaaggagcctggcacagataaattcatgataaatgcattgtcagtgaataagtgaattaccgaccttcttttccctgagcagtcattcattcatcattcattcaaccaccatttacagagtcagctccatgccaggcactgctttggctaagtggagacctctgcctgcaggatctcctggtctgtggggagagacagatccccgtgcggatgggtacgtctcagtgcagtccaggctgccacatgggagccccctacccagaacgagcagagagagccctcaaagagcctaccatcaccaagggaaaggagatttagacctgagacaaagacaaagctgcccaagcatttggggtatttgagattctgattatgcacaggacgggagtttagagagccacagagctgcccaatgggccggaagctgctggctgcaggatctgggaatgcaggtgccatcttgctcaccttgaagcccagctcagccagggtctggcacagagggggtggtcagcataaatgtttgttggatacataataaatgaggagaggaaatctaactaaataagaactgcatttcagccccactctgccacataccggtcagtgactacggccaggacacatcccctgtctggcctcagatattttccaacatcctctccaactctcacattctatgatgatgcagagaggcagcctggaccctcagggtgctcctggactgactgtgcgcgtgtgtatgtgagtgtgcgtgcacacgcagcacatggaggatctggatgtaggaacaagcgcaaaatatgataattatcattttgggaacacttgttctgtgccaggcacaggatgcaaaggtctaagtgcttcacgtgtattgcttcattttcctcttactcaaactgcacaacacgggtgatgttgttaccaccaacccaaactgtacaaaacgggggatgttattatccccattttacagctagggaaacggaggctcctgagttggaataaatactcccacagatggtcagtggcagatgtgggattcaaagcaagatctgttggactccaagctcttagctgctacactccagggcctcccacgggagtgtgccctccgactccagggtgcatgtctttctgccacttgagggcaacttttggtgacagaacctggctgagaattcagagatgaccgaggccaaggctggggggagctgggggtgggtgagtgaagggcgttcagcttcactgcctctccacgcctctgttaactgcagccaaatcccccatgtgaaagacctggcttgggctttcctgggcttgcatgcgagtttttgctttgctcaaccaaagggcttcctgcggtgctctggactgttctttctggccaggctaagggagggcagaggtcagcggaggccctgcctttggctcaccctcccagagggtggattcccagcaagtctgagagatcctggaatggtctctcggcatacaggcgggagtactgggatatttgttcccccggacacagctccctccctcatgtgccacagagcagcttagagggagcagcttagcactggaaacccagccatgggaaaggctgctacaggctggcctttgaaagggagttctctttcttcaagtgcttaggggagaaaataagtgagaaaaagagagatagaggaaggaaggaaggaaggaaggaaggaaggaaggaaggaaggaaggaagaagaagaaaaggaaacgaaaaggaaaggaaaggaagaaaggagagaaaaattgaccatactaggggtctggtctgttgagtcaaatttcctgatgggctcatccctaatgatgcctgaaatggaggccactgtggggctgttcttgcaaatgtacttagtggatggatcgtggcctcttgtgcagctgcaagctccctattccaaggccccaactcaacaggtccgatgctgattccaaatagagtcaccctggctgggagggcctttctgggtccccagggaaagatttggatggtggggacctaagatgctgcagctgaagctcctgcccttccaggagggcagggcagtgtcagggagcctcagggccttccttgcaggttcaggggcctcagggggaacatcgcatggctcttcagagactgtccctggaagtgacctgaactccagggactcaggccagaagcagcctcttttgcacacgcccctgcccctctagtgaggtgtgggagtgggtggggaaaagccttgctcatccaggcctttggaaacatcccgacacactttcctccaggcaggccgaagttattttccaagtatttcactttccatttcttctccagatctggtaacagggtgttcctgccctcttccccttcctgacccttctgcctgggccccgcccctgctgcgtttcatcaagtcgacatgctctaagaaagccggccaaatctgcactcagccccacggatggcgcagatgtgtgtgaccagcccccctcggcctgcagaagcttaccatcgagcctaggggacagctatccagagggaaacaggcaccgggggctcagtgggtcatgggctttgaggtctggcttctctactgtgttaccctgggaaagtgtcttgagctctctgagtctctacgtgctcatctgtgaaatgggggttaccctatctcccttggaatgttgtgaggttcagagtggacaatgaatgtgcttgcagtccagtgcacatctgggttcatactggggacccaatgcagctttctgacttaactttcggaggtggaagtcaactgttggagatcgctctcttagggacagcctttttgtgtctttctaggtatgcagaagcagtccaggcagtacaatcagccaaaactgattatgaattctggttatacagcttcccagctggggaaccttgagcaattcatccacctctctgggccccggttatgaataaaatataaaagaaaatgcaggtaaaatgccctcttcctcaagggaatgccctctttctcaaggggttgaggtcaggattaagtggcataatgcaagcccttggcacagtgcttagctcgagggatggtgacaaatagtcatgactcttctttgatggctcagtttccagctgctctccctgagatgccatgggaggttcttggctgggaagccaactgtttctttgtctaagagggagaagatgctatacatcttgctctcacttaaccctgctccctcccactcaccaccaccctttttctttttccaggccacatgagttttgcagagcagacgtagaaagcagagaatgaaaaaaagaaaaagaggagagatctgaagccagaatgggcgtcatgcaagaggctctagagttgcagacagttgcagcccagatacgacgtgcaaagagagacatcccagatctcccacacagaactccggcgcgctttgaagtgttgacaacacataaaattaaaagcatcacaatgcgaattatcacgttgttttttccactttgatagcctctacaaagcattttataccgatgaatcaatacaaatgtctctttataaagacattggaaacaaaaagatacatttttttttttccttaagagaaaccgacacaactaacaaaaagatttcagccctggcttgcaggatagctctaggtaacatagtgagtttgtctctccttttcacagtggccttggaggtcactgctgtctacttgcttgggtcaatcattcagcctccggatgaatgttctgcctgctgattagtcagcaccatgagatgagacaaacaagccacaattgcattgctattgcctcctgactgcacacacatgtgtgtgcacatgtataagaatatatacagtgtgtgtaaatatatagaggcgtgtgtgtgtgtgtgtgtgtattttgtggtttggtaaaataaagcttgcaaattaggattaatttataactcgttataattggattattggctgggactccctttatgttacagcagatggacttttgcgtgaaatattttccctgagttgctatagagatgtgccaagatctctctgctgaagtgattccccgcaggcctgtttgttgttgtgcccggtgccgaatcacttgcaggctgaatcacttacagccctcacagaggctgatgaaagagccccgggaccctgggagtctccagcctctcagctactgccaccagagatgggctgcaaaagtcattagagctagactggggggtgggtggctgagctggtgggtggagggggatgtccaggtgagccaggcagccacaggggagagggctgctgtgggcaagaaagataactcaggctaatcaaagacctactgtatggccaggcacagtggctcacacctgtaatcccagccttttgggaggccgagatgggtgaatggcttgaggccaggagtttgagaccagcctggccaacatggtgaaaccccgtttctactcaaaatacaaaaatcagctgggcgtggtggcacacacctgtaatcccagctactcgggaggctgagacaggagaatggcttgaacctgggaggtggaggctgcagcgagctgagattgcaccactgcactccagcctgggcgacagagccagattccatctcaaaaaaaaaaaaaaaaaaaaaaaaaaaaaaagcctactgtagctagatgtagttctaggaacatgtagacattccatttatctgtctagttcctgtagcaagcctatgaggggagtcctgtttttcccacttttcaggtggggaaaaggaggcacagaagagtgaagctgttttctcaagctaccactgcagtgatcttagcaatggtgtctccccaaaatgggggtgaggtgggatagatggggtacatttaaacatagggttctgggagaactgagaagccacaggctgggcggggtagccaaatttagccctctgccagttcctctggctgtcggaggatcctcagacaaaaccgccaaactccatcacgcaactcacagtccatttgggcagacacactcaggcctgtctgatgagcaacataaacatggccaagcgcctcatgagacgctgtgggtcctgactcttgaaccagaggctgagtatgggggccccaactccccgatttccatctcaggcaaagatgtgaatcaggcaatgtttccagagagcagagtttacaaaaagtgtggcctggagtgatgacaaaggcatgggctttgaagtcagacagacccaagttagaatcttgaatctacccttgtccagagctgtgacttttctcatctgtaaaatgggattcattgtacttacctggcagagttaggctcagctctcccagtagaatggaagctctctagaacagtgcctggcgcacagtagaccctgtgaaatacacattgaataaatgagtatgtttttagtatatctggcatgtcataggtcttactagatggtagaaattatttcaatctggcacttttagactttggagcccattttcttctttcatattgttagcttcccttcctgggcagtgtcaagatcctgagtccttgcgtctcttccccagcccctaccaacccatgtagacaggattcttggagactacaaactgcccaacgtgttaaccagtatctcagtccatggagatctcttcctaggatagcacgttagtcaggactctttagatggcaaggacagacactaactcaatctgtcttaataaatgaacaaaggaacttactaataggagtaaatggcttcaggtatggctgaatccagctgcccagctaatctctttacatttcttaaatttattctctttcagtttgaatccaccttcaggcaggctctgcccttgtgatggtaggatggcggcccagcttcaggactacctctcaccagctcagcaccttaacaaaaagagaactcctgcccaacagcttaaatacaagccctaggactgcattttattgaatgtattatataacgtattatataatacttgggtcacatgccaagccatatcatgtatccatcctggaaacctggaggtggagtcaaccccacctaaatcaacatggtctgagaacggggaaggagcagttctccaagggcaaggcggaggttcttgacagaagaggagagagacgctgagtagatgagaacagccaacatctaccacagagcggaaaacaacaaacttggttctcatgacaagcccaaaaggtagttatgattcttctcattttgcagaaaacagaagcacagagagtctggggaccctgcccaagaccacatagtgtgtcagtggcagattcaggctgggaatccctaagcctgtgttcttgccaggactttacagaaggaagtgagcctcgcagcaggtcatgaactagcagctggaagatacgtgaaagatacagatgggctcagaatcccagctccacaaggggaagcttctgggcccatgcaggactgtttgtggttcttgccctcatctgtgccgagtagcacaagtctcaacataactaggtgcttgcttttcttcatctttccaaaatcccagagcatgttgttggtcatgtttgcaaatcttataagcaacttataattttattttgattgtctcaagtcagaaataatttgaccttggcattattgagaatcctattttcaaacttttttttttttttcagactccttggtggttctatctatttggagaagcctttatatcttcacacacctgggatcttccaagaaggttttggatgagcacgcctcaattcagtcctagagacctatgctgcatttgtttccttccctcttggtccacctccagccctcattcaattctaagtctcatcatgcctttgaagactgccctgctagtctcaaacctgtgctttttcctttgttcaattgtgaccctgtttatgatgctacagaaagaacagctttgcatactccagacttggttccaggtgtctgcactcataatttatgttgcccttcaatttacctatagaatcttgccttttaagaactggttccacataaagtttctaaggggcttttaaaactgtaaagcaatataaatgatagatgttataaaatctaagatcatttgtccatgttattctctacctgttggttccttcctcattgaaaattggtgtatagatggtagatagatagatgatagatagataggtagatagatagatagatagatagatagatagatagatagatagatagatagatttttatttttggtctatctcctttactaaacagtaagctccatgaaaatatggatcatcactgtcttattcaccattatattctcagcatatggtattgtcctggtatagaatagattctcaataaatgcttgctaaatgaatgcattcatgagtgagtgaatgaatgaatatgcgagtggatgagtgtgtggaaaacatggtctggctttcccaaccagatgagaaagcaaaggcaccggagttagcttcagctgttgcttcctagcgatgtgaccttagtttgacctttctgtgtttcagttttctcatccttgaaatggggaaaatactttactgaggacaccaaaagatcacctatgtgaattcaatgtttgatatactaagcactcaataaatatcagcactcttctctctgcccttcttggagattccataatgcctacaatggtggtcaaatactgagtgtttagtgagtactttttgatggatagttggataagtttatcagagtgatggtggccacatgttgggtgtgggatttccattctggcttgagagaaaactgtgagatgtgtaactgaaccaagaattcaggtaagcactgggcatcataagaagttggaatggggaggtcggtcgggtctgtgtgcgtgtgcttgtgtgtgcatgtgtgcatgtggatatggggagaggtgtgcaaggagaggacacagttatccaaagtccactgattctagttcagaatttaaaaagttaaattctaaaaagtttaagttgagaattaaacaggtacctggcagcccctggaaattcttaagaaggaaaaatatagtggaaattcttttagcatctgcatgaaggacagacttgagcaaggagaggctgcaaagcctgttctagtaatccaggaaaaagagagaaaggactggtaggtattcaataaaccattttgacatgaaaggtaaggtgaggcgagtcttgaagactcctcggatccataaatcaagaaatcttttttgggtatggagcaaatgagaagaagggtccaaattagtttttatttttccttctaaaattatgtgtgaatttttttattacaaaataatacagctccactataagatataattagaaaatgaaagaaaaaataatcacccataatcctgtaaccagaacaccactgtgacttcattttatgaccccaaatctatgaccttaggagaatgaatgagtctgctgtgttcatgatgggaacatagagaaaggctcagaagaatgttaaagagaggccattgctgagctcacttgctcatttgcttatttgattcaacccataagggagacctcaatagcaaaaaccacatcttgacattgtgttggaatctgccagcctctttatgcaactctggatgtcaacaatgtcaggttacctccaacatgatcaccagggtcctctccattccctaccatatagtaagcattttagtctagtttagtttttaatctttttttgcatctgcatgtaatcttcttttgggagcattcctcgctgtgtgtagtcctggcaatctgaattctttctgatatgtgtgtaggtcaatggttgcttgccctgtccatctgctagatgaccccctcctttccatattctcctgttagtgtctgggaaggttggttcatcagcctgttggtctgtaggtcagctggctaaccagatttgggggaggcagacaggttagccttacgatccactgactcactgacaaaccgatccatcggtcaatccgttggtctgctggctggccattagtccaactgtccatctattggacagtcagtcccttcattggtgtatcaaccatgccattggctcaaccatcccttggttatttcaccaacctgtcagcccatgggtcagtctctccatgagcttgctggccggttagctcctcagtcagtcagtaagcctgtcagttgccagtcgggctacacccctgatgaacccctccagctactgatctcagtcctcacctgagcgggcagggcatggagggagaagctcattccctctccgatgaggtcgtttgaagtgctctgtcaattctttggaaactttaaatcaaaagttatttatgaggtaccagagtaaaaacagcctcgtcattgtaaattactagcagccaacttgaattcgctcattttcttttaaaattttaaaatatttagaaccctggtttttctccttgtctccgctcccactccctgggactgccccctcctcctctgtcatttgagggattggttttcaggagcatgtgacttcatcaactgctcctgatgccaaccagaggtgccaaggtccatgaagagatgagtcacccagctgggagaggaggctatggggagccaggcaggtgcccagaccctgggccttggggttctgcttacgtgtttgtgaccccaaaagtaaggcagtagaccagaccatggggcccttttccacttggaggcccctctcagacacggtagaactggacagatgattctccagggatccagcaaagagggttaaggagctgttttcctgtggactctccttgctttctgggggtggggggaggcagagtctctttaatcttcagagcaaacttcctaatgactgagagagcaggcagcatcctgagtgccaggacgcctgggttccagcccagcccatggccaagagcagaggaagaagctagctcttgaccaccgcctgcctccccactgagccactctctttccaggtttcttatgaccacttccctccctcatctccatctcaggctgtctgagtgctcctcaactaatctccaagaactgaccccgtgcatgggattgagctgccaagttaaattcactaacaggcatttactcgctgcttattcaggtcaggatctcctgtcctctccttcaaaggggcacacactttcattatttaggtaccaaatatttattgaatacttgctgcctcaaagcactgggctaggtctgaagatacagcgttaagtaaagcaggcattgtccttgccttcctggagattagagtcttggcagatttacgcattaatgaaataatggcacaaaaaggtgttgaatctactgagatagacgatttgacggaaaacaccagtggtctaggaggaagactgtaacaaggcttaatctggtgggactttgggaggtcaggggcttctctaggtatatgattgagtatgaagatgaacagttattaaggtaaagggaaagccaggcacagtggctcatgcctgtaatcccagcacttcaggaggctgaggcaggaggatcgcttgagcccaagaattcggtagcagcctgggtaacatggcaagaccccgtctctacaaaaaatgaaaaataaaaaaattagccaggcatggtggtatgcatctgtagtttccactacacaggaggctgaagtgggaggatcacttgagccaagtaggtcgaggctgcagtgagccatgattgagacactgtgttccagcctgggcaacagagcaagatcttgtctcaaaaaaaaaaaaaaaaaaaaagtaagtggaggaatgatcatctcaggagagggtacagcacatgccaagtccctatagagggagggagcctggaacatcaaggcagccaaagaaagctccttgcagctgttgacagagagtgtgggaagataagcacatagacagacaggcaggagcttcctttgttcgttcattgttatgttcattcattcatgcacacatgcattacacctgcattaattttctcattcattcctgcattcattcaacaaatacttactggatgcctactctatgtctgccactctctcagagctcggtgactgcaagcaacagaaaccaggactggataacagtgctggctgggtagccattggaaggatgctgaagaaccacaaaattggtgggatgtaggaggagcaggcttagaaaagaaggttgtctggcatctcaggcatctccaggaaccatagcaaccatcttgctgcaggtcctataaagtcagccactgctgcaatgatgagtgtcctcttgccattctcccttttctgtggtatgaagatgcaaagttttagaaggaggttccctctggctgtcatatacttgcctcctaccataccaggcctacaaaataaaggatatagtccgttggctttcttaatggttagccagcccctgggtttccaccaagactccatgcaaagggggagtggtgattctctgagggatttagggtactcatacagaggataaataaatgtttggtagccccaagttacctatagttcattacaacttttgagtcctaatggtcaaactaggagctcccacagccttcctggcaatggttctcctttggaattctgggtactatgtgatctctgatgctaacacaaaaaaacagctttttgcacatatctaggtgtgtggctttttttttttaacctggtgtttgagttgctccctaaggtattttctgatgacatccttgccccctctcaggtattatatttgcgggtgtggtggtggtgagggtatggccacccaggaactggtgctagaggcaggatttggacccaggcttagctggctccaaagccagtgctctttccactacaatcctcagccttcagaaaaccagccctgccccgatccttaagaggtgggtcttcatagtctcagcgataagcaggtgcgggtaaccccaggaacacactctgacggtctctactatgtctttaggcacaagcttcacagccaaggcctcggggtcttcgcttatgaaacaggcatgaaaatcttccctttggcacctctcagtgtcaaggtgagaatatagcaatttgatgtctgttgagaatctttcggcaggtcaaagctcagaattgtcatggctcccctgagctcagaggctgcaaatagttgagtaagatgaggctcatgtaggaggcagcaaacctgtacttagtggacaggaaggggaggtgtgcctggctttgtcctctttgttagtggagaggggggtaggggcagtcacaaggcagaggaacccccttccctgtggaatctggttagggtgcttgcacagggaagagacggtcctttctttgtgagaagcagaggtaggagggagctgcttagggtgtcttcttagtgcaaggagagtttcatcttaaggaccattcctttcaccaatccccaaacgtcagtttgctgattaaatcacacgagcgagcatgcgtgtacacacacgtgtgcatgtggcagggcagcaggtggatgtaggggtaggactgactcaatacgcatggaaatcagacatgcctttgagcaggtctgctgaactgggcgtacggacccaccagacatgacgtacaggagcgatgaggagtttcctggagagaataagaacttaagaaggagttgggcatagagggctgacctgggaggtcccaagaagggcacaggtatgactccttggatttgtccccagcccaagtccgtggcttcatatctgggttcagcaacaagctagcagcaggctgtgtgggtagaatgggaagttctgtaatacactgggcccaggaagccctgctgtaggactcaaagagggagagggccattctccccattgttgccatgaaatctccatgaaagtttggcatccgcaaggtttcagtgcagctgccataggagacaggggtgcagccagggcgctgtggaggagacgtgttcacaggcacagaaggatggtcctggggatctttgggtaggaatggtttattttactagatgccctggggggactcattttctactgactatgtacgatgtgccagacgttttctctcacattgccttctctgtgacactttctctaaccttcctacttcccttttttctcttctcctcttctgaatttatacccatccttcatctgtccatccattcatccatctatccatccatccatccacccatccaccctctcagcaaaagagaaacacttagtggtgatatgtcatagtttattaaccacttccctattgagggaagcttaagttatttctagtttatgcttttataaacaatagtgcaatgaaaatccttgtgcatgacttggaaagtatttatcgagcacctactttataccagatttgtcctatgttcctttgtagtattaattaaatttttaataagcatgtcttgacttcccaacctttgtgaaccagcggagcgttaggactttgcctttgcaggccccataactcactgtccctactaggtgcttaataaacattgaatgaataaatggatcaatgaataaaaataatgagccacccatggagccaaaatatgagcctcaacggggcactacagcttgactcctaccaatgaactcattcccaccctagctgtctgtggtgtctgctttcagtatttgaaggcttttctgtttttcaaagctttggtatctgctcctctctgcactttagtctctgtatccagcttcatcaaaggctgggaagttagaaaggggaacaaggaggggaataaatgaagtggaggccctcagccatgagcacataggagcagagttcaagcatcttcaaatcgtcctcccacgtagctctaggctgcagccccattaaagagctgcccatctagccaccagctctgcgtgtgctcaccttcttgcctttgctggtgctgttctcttggcgtggaatgctcttcctcattcaaatgccaccccgtaaaatgttttcccaaactttctgctaggcagagcgaatcgatccaacattctgctctggcaaaaccttctgcatctcttcccacgttatagtggccagctctccgactgccctgcgagttccactaagcaggcactacaaggatggcaaacagattttacctcaatgtgccacctctgatcaattagtagtggccacccagagtgatctgtctaaagcagcacaggccaatctaattttaatgggagacacatataatttaaaagtttctagtagctgcattcaaaaatggataaacagataaattacttttaataatatattttaacacaatatattcaaatgttaccatttcaacctacaatgtgtataaagttatgaatgagatattttccattattttcttcagtctagagcatttgaaattccacatgtatattatacttacatctcaattcatgtgctaactttttgtcagaaatgcttgatgtctattaaggttttataaaatgtatatttggaaaagtagattcacatacctaagttatcccaaacttatgtaaaattttttaataatgaaattatcagctgttacatttatttacttatttatttattattttttgagatggagtcttgctctgttgcccaggctggagtgcagtggcacaatctctgctcactgcaacctctgcctcccgagttcaggagattctcctgcttcagcctccagaatagctgggactacaggcgctcaccaccacacccagctaatttttgtatttttagtagagatggggtttcaacatgttggccaggctggtcttgaactcctgacctcaggtgatccacctgacctcccaatccttccaaactgctgggattacaggcgtgaacctctgtgcctggcccagctattacatttaaattaatttttaacattaaaagtacagtttcttagcagcactagctacatttcaagtgctcaatagccccacatggccagtgacaacagtattggggagtggctatcctgtgcctgatatttgctattcctagtcttatttacctctttatccccagctcccaggtgggctcactcgatttgtgaaggaaggcatgaggcatccgctgcatcgatgtcttagcaagttacggtgtactgagagctggcacattcagctgtcttacacagagagggaaagggtgctacggagcccctgaagtcttctgaggaggggagacaacagcagatttgcacaagaaagagatggctctggtattggggaacagaccagggggtgtatgttcctggggtgggcagtgggcagggaggaagcactgcagttaccagctcagagtcagacaagatggttaaagccacagtcaaggctgggcatggtggctcacgcctgtaatcccagcactttgggaggccgaggtgggcggatcacatggtgaaaccccttctctactaaaaatacaaaaattagcctggtgtggtggcgcatgcctgtaatcccagctactggggaagctgaggcagcagaattgcttgaacctgggaggtggaggttgtggtgagctgagatcgcgccattgcactccagcctgggcaacaagagtgaaactccgtctcaaaaaaaaaaaaaaaaaaaaatgccacagtcaagacattctggctccttctgctcttggaagaaaagtccaaagaactggtaatcattccagttctggggaagggctcctttctctcaagggaggagctgtattgttgctgaatttttattgctattgtgattcattgacctcactctgaagaaggagctagaagccacaagaagtgtagaaagaacaaagaacagggtcctgagtgagaggctctccaagttgagccgagtggccaagtgaccctgggccaagtgacctcacctctcacagggggcctgttaggatgccccttgcaatgtgtgcttggcaggtggtgatggtcagtgttgcacgtgataacccatataaactgtctcttcacgggtctggcacatagtcaaggtaaggactcagacaatggcagctgtggttgatattagttttatgactcacacatgaacatctgcaatgtatgttagatgcaaggactgagataagaaaaggtgtcatatagaccggagacccccacattaccctacgacaggagggaccaggcatgggtacgttttgagacagtgccttggggagacttcctccttctagagtgaggagatggcagagtccggcagaatggttctgatcatgggtactgatgccagttcaccttgttaaatcccagctcctccacttaccagctatgcctcagtttccttggctgtgaaatggggagcataacagtttcctccttattgaaagtgctgtttgcattgttatcattttaccaatattttacgggcaagggtacagtcttcggctctcccgtggcccagccaggcatctggtggagacaacaagaagggcaaggcaaggttctgcctcatttcggcagggagtcacaatccggtccctccctgactctgccatgtttcttcaatacaggaaacaagacttcatacaaggagcaccggcgggatttgtggagacatctcagagaagtccatgaccacaaactattgctcacaagtgcacagtgatgggcagtgggataattggagaaagtcagttctagctccaagcacataaccagaggttacgtccttggcaatgccagctttaccaatggggatcgtggtcgtttagataaatgcctcccccaaaactgggttcgcagactggaagcctcagaatccctggggaggttttttaaaagtacagatttccgggcctgtctcagacccttgagcctggatctccgggtgcaggctcagaaatctgtatattttttaagccctcccccaaccccaggtgattctgatgcacagctgcgattggaaagcactggctttcagctctgaaatgggagctggtacaagaatgagtataatgccaacagaacaaacccaaggatatgatgtcctcagctgcaatgacagatgcccacacactccagcccacaggattaactaacagtagagagcatgacagggcctattgccatgtgacccttactcttggtgactccctcttcctgccatcctgctcacttttctttctagcattgtgacttctcttgttccaagactcaactcaaatcctgcttatgaagcccactttaactgcatccatagagaggaaagtggagagtagattataggcatcagatgtgttaaaaccagcccaactaagaaattccacttccagagaattacagagaaatactagcttgagtttgcaagggattatgataaagacatccatcaaagcactgtttgtgatggcaaaaaaatagaaatggttgtccatcaatgggtaaatggacaaaaaatctgtaatttatgtatacagtgagcattgtttggcaagtcacatcaatgtaatacatcgatgtgtctcaatatatctaattctcaaaaaagcaagttgcagaaggatataccatatctgtaacatggtattattagataaattctaaaaacacaaaatgattcgacatagagtttgtgattacatctatacatagaaaagttattaaatgtgtggggaaattatacacaatcatcttcaagttagtgatttacctttttatcactataaaaactgaaacaaaggatgataaacatcagcgttgattaaatctcagtggtagatcaatggatgtcacactattttctttacttttaagtatgtttgaaatattttataataaaaataaagcaagcaagctttggagaaatcagagatgtaagagtccgtgtagccgggccgggcgtggtggctcacgcctgtaatcccagcactttgggaggccaaggcgggcgggtcatgaggtcaggagatcgagaccacggtgaaaccacatctctactaaaaaatacaaaaacattagccaggcgtggtggcgggcgcctgtagtcccagctactcgggaggctgaggcaggagaatggtgggaacccaggaggcggagcttgcagtgagccgagatcgcgccactgcactccagcccgggcgacagagcaagactctgtctcaaaaaaaaaaaaaaagaaaaagagtctgtgtagcctgggaaggacagaggtaactccttgaagatttgggactcagtgtgggtatattttgaaaatgtagagaaaaaaaaaaaaaagaatgacttgtttgttgtttggaagctaaagtctttacttttaataaaagcatttaacccatttatacttacttcatagctgacatatttggtcttctgtcattttaaagtgtttcgctattgttttaggtctatagctctggcagcacagatgaaagggcaactttcacaaacacatgcttgcaccacagctcaatagtcaccaattccacccacacacatgaaatgtttccagaagatttgggctcagcaaatgacccttgtttggataagagggctcagctagtgccatgtctttcaatcagattaatctgaaatggggatggagtacaacgggtaatcttcatccagaagtggatgttgcattgcaacttgggactccgttgaatgtattatgaaaggacatgtcactttgagaggcagggaggcatgatggagtgagatttagagtcagatataaaacaatttcatctatggtttgctgcagctggaccctggctgtttctgagtgattactcaagtcaaccccatccagatggcagacgtggagtgggccagctctggtttgagtcacatctcttatgcttaccagttctatgttcctggatgagtcatttcatcactctgaactttagcccctcatcaaaagtgaggacactcatatctacctggtagcatcgttggcaagttgaattgaatgttggtgaatcaattgaattgattcattttatgctaatgtaaacccactacatgccaggtttacccctggcatgtagtgcgtttacattagcataaaataaattggtagattttattttctctctcacatcccttggttactgacatacaccatctcattcctccttcccaggaaggtagggggagaagcaagtcccagagaagggttggcgctggccttgcagcaggttcatcagacgagccaccgggctgttactgcctgtggcctctcagggaaggcaaggggtttctggctgcttgagagaaagaaggacccctcctcccccacccccggccccatccagggatgggggaggcatccagggagtgctgggccggccctccagtcgctgccagctctccttctgagcttgcatcagcagagaggcgcagcatgctggggcctggctgggccggctccacgctccatgtgccctggcccccatacaccatttgtcgagcagcagaacagaatttcctcataaataaacaagatcttgagtttcacgttggggaggcgatgacagaagagggcctggggctctcgacgttatctgcacccgggcctgccaactcctggccgcctgaaggagccaagaagagagaggaaggagaccctggccaagagcacattctttggtggtagagtcactgcctggcggctagccgcagctcctctcatttcccgcgacgtccctcacgctggccaccgggggctctggggcttggcatttactagaacttctgcccggccaagcgcaagcacctgaactttgttgttagggaggtgggtgagaggggcgcccagggcctgggagatgtcaggcctggaggagagggcatctagcaatttctagtctagatggcctgtcttgtgctatcctggttgaattcttagctcaatccccaaaatggggtttgatccatcctgtcccaagcccgaggctgactgaagaagaaactgaggacaatcctaccaaaaaacggcccacctcccagcatagggaaagtggaaaaagtggaatactatgcaacagtaaaaaaggaagaatcattgccacatgcagaaacatgagagtcaattacacatagtggtgagcgacacaaaagaacatacactgtaggattccatttacatacagttcaaaagcagacaaaattaacctatgatgacctacgtcagaatagaggctacctcttgtgggaggaagggttgagtaggaaggggcagagggaggtctctgggggctgggaatgttctccactttgatcagggtggtgggtacaccaatgtaggcataaggaaaaagaccttgagctgtacacctaagaagaatgtgcttttgtactttaccatgtataggttatatcctgatgaaaaatttttttgaaaaggatcctaaaaagaattatatgagattatctccttactcaattaaaagtgtaccctgagtgcccattggtgaggagatataattcaaactcctcaccaagccctgcaagagtctctaagatctagcccctccaacctcttcaccttcttcttgggttatgctccccgctgtgcctctccagccttttactgtccctggaacttgcataacacattcccaccacagggcctttgcacctgctgttccttctgccagaaatgtttctctctcagttcttgacccagatgacgacttattcagatctgacttcaatgtcagattccctgactatttctttaaaagagctttactccagtcgctataactacactgctctgtttgtcactccagcagttattatcgtccaaaccatccaaggtgattttatttctacatttgttggtttgtgtgtttgctgcctccccttggatgtcagcccctagatgctacacagagctttcccgttcagctggggatccccagtgcctgcatgtaggatgtgtagcaggtatttggcgcttgccttcccatcttctaatccttcctccccatttaatttggggttctatctttctctaattctcagcccatgtggtctgggtagggtttctggagaagatttttgatctttcttgctggactgcaacctgggtggatgtgaggctgaggccgcggctgctgccagcattactactacttggaggagggaagagctgagagatgcagacacgaggtcttggaaatagcacttgaggcctgaatcaagctgcatctgaaaccagacctatacctgggctttccagttacatgaatcattagatttccgttttcttaagctagttgttttttttttgtttgtttgttttaaccaaatgaatgttctctgccatccatggctatagaggaaactgaggacaatcccctagtctctagggggcagtatgcactgtgtctataactgatgaagatcagatcacagacagaacagcacatcttcccaacagtgggagagcacatagttgctcaaaatgttcactgagtaaataagtaaatggatgaataaacagacagataggtgagtggatggatggatggatggataggtgggtagataggtgtacggatgggtaggtggataagtgggtggatgaatgggtaggtgagtaaatgggttaatgggtggatggatgggtggatggatggatggatggatggatggatggatggatggatggacgaatggatggatggatgggtaaatgggtaggtggataggtggatggtagatggatgagtgtgagacggataggtggatgagtgggtgaatggataagaggatgggtacatggatggacgggtggatgagtgcatgacaaatgggcgagtgggtagatgaataggtggacgggtgagtgggtgagtggataagaggaggatgggtagatggatggatgggtgaatgagtgagtaataaatgggtgagtgggtagatggataggtggatgggtaggggaatggatgggtagatcagtaggtgggtgggtggatgagtggatgggtgggtggacggatgggtgggtgggtgaatgtcttgctctcatagaaaggtactcatcatcacaaggccatgggaaaaaaatctggtggaagaggtcactgggtctggtgggtactacagaggaggtggggcttaaattggatgcgttgggggggccagggagggactgaggactagtctttcttggtactttcaaatatttaaaactcacacaactccatgaggttggaatgaagttgaggaaactgaggctcagaaaagtataatgactagtcagggccacagagccaggaaatggcagccgggatggaaacgcaggtctgagccaaggcccttgtgtgggctctcctcccagcctgcagtctgcctgggaccctctgtctgcagtgtcagaaaatgaattgggaggacagcagtctcaaagtcccatcctggcgatgctcagggccccctgggaggcccaggccggatcctccccacctctcggaaactcatgtcagcggcctgacagctgtattccactggccggccacagctgccactgaggcccttgttcccaaggctgaatgttccaccacttttttcctggcaccccaggcctgacggccgctcaggaaagctactgtacttgtgagaaaagtgaggtcagtgcatgtttccatttactcggagaaggaaaacaaaaacaaatattctcgctactgaatgtgctttttattcagcagaatccatccccagaaggctgaatttatggttcacgcatgtgtccctgagcatatttaccaggggacatggtggggaaggcaagaggggcctgtggccctggtgtgtcttggcaggggcttcagtttctgcagcagcaagggggctagagagtgacagacagaagatggtgggtcaggatcacaggagtggagggaggcttgggggcaaatgaaggatagtgaataggatggctgcctgcaactctgctatgcacatgtggttctggggcttagaacatccttcccttacttttcagtctggcaaccaaactcctactcagtctccaaagcccagttcagtcttccctgaatgttctgggcagagttggccccctctccgtggagcttgctgactccctgcccatccatcatgggacccgccacctggtatgtccccctctagatgaggagcacctaggggcaggggccgtggtgacagacatctgaaagcccaacccaggcatggtccacagtgaatgaacgagtgagcctgagtgagagcgcaagcctgtggggagagtgtgtgggttgcagagcaaacctagtggagtctctgaggctctacaggtcagtggcctgaaggagcaatctgctggggttggggggtggggcttgcacaaaatctggggccaggttcaggaggtatgatttgatggtgggataaggggcatggctgaggtggcatggggacagccgacaatcactctcctgaggcgactcagtttacctatatccaggcttacctggccacagatatggccatgagcccctgcaggttcagctcactctcaccttgtgccccattcatgccctacccccatcctcagatgcaccccaaacctctccagccttctgcctctgccccctttctctctcttctcaggacccaggggatcgatgttctgctcactggcactttctgggtatgtggtcaaacccacagttctggatgccaccccctccaccccctaagcctcagttttcttatctatgaaatggaagttgtgatcactgcctcactgggtcataactgagcttctatgtgcaaagcacctggcacagtgcctgggacagagtaagcactcagttccttccttctttccacagattctatttggtcttctcctcttctgatcgtgaagtccacccctccccaaccacccccagcaaagatctgtccaaccctgaaatcttagtggccacaggttagacctgtccccggcagccttgtgaccttcgtgatgtacggcttaggtcaggagggtgtcatttggctgtttgccccattcccctcgccccctccagacgagaagggctgggaaacttgacttcatttattttcatacatgagagagagagggagagagagagccagggcggagggggcaggagggggtgggaggggctgggagagccaggaaggatattgggggcctcaacccctcttgtctcctgctcgcccaggtctggctctgtgcccagttaccaaagaaagccacagcttctgcaaaacacgctgacaaactcatgccacagttggaggacctgttggggagcgttagaagccatgctggctactgagagtggatgaaggtcccttctcctcctcttcctacccagtgactttcatctctgaaagtaggggaaacattgcctataaattactctctttcacagacagcacatttctctttatgaatcacgcgggatccaccttcagcctcagtgtgtgtaaaacaacaaatcaggagaaatttgacttgacccaagcagggaaatttccatccatcacaagaggaaaatgttggtgcagcagggaggggcacagagctggtgacagtcagcagtgggtgagcggcagggcaggggtccagccagggctctccacactccagggtgggtgggagatgggtcgctactgagacaccagcaggctccagcagcagcaggttctggggctgcggtgactccctggtctctcaacgagcattccccagaccttctctcacactcctcaaggccttgcaggtcacctggctcaaagtcactcctgccagatgggacagtttctatgaggggacttcaaaaagttcatggaaaaatggaattaaaagatcaaaataaaaatatgagctttatttctcaacataagctccatcaagtccagacaccatttttcttttttcttttcttttctttttttattttttttgagacggggtctcactctgtctcaaaggctgaagttcatccaggctggagtgcagtggcaagatcatggctcactgtagcctcaaactcctgggcacaagtgagcctcctgcctcagtcttccaagtagctgggattacaagtgtgcatcaccacacctggctatgttcagacacttttataagcaataaggccagccatttagtccatccctaaagaactaacagtcttgggaatttaaccatgtcgaggcaattgttttttacatgattaagtgaagaaaatgggtgccttttacaagtttttaaagattttacaagattttttaagatttaaggtgctcttgtttgatgagagaaatgagcaggagtgtcattgtggtggaggaggcttctctggtgaagatttcccaggtgttttcatgctaaagttttggctaactttctcaaatcattcttctaataagcagatgttattgttctttggccctccagaaagtcaactagcaaaatgccttgagcatccccaaaaaacagttgccatgccctttgctcttggccagtctgcttttactctggctggcccagttccacatcttggtagccattgttttgattgtgcttcatcttcagggcagtactggtaaagccatgttccatctcttgttacagttctttgaagaaatgcttcaggatcttcattccacttgtttaacgcttgcattgaaagttctgctcttgtttacagctgatctgggcacaacagttttggcacccatcgagtggaaagtttgctcaactttaatttcacagtcagaattgtgtaagctgaatcaattgagatgtctgtggtgttggccattgtttctgctattaattgttggtcctcttcaattacggcaagaacaatatgaaatatatttaccattcatttagtggaaatggatcatcataaaggtcttcatcctcactgtcttcccaatgagtaggctgaggagggtgaggaagaggaggggttggtcttgctgtttcaggggtggcagaggtggaagaaaatccatgtataagtggatcctcacagttcaaacccgtgttgttcacgggtgagctgtaattagattcatcataatttcttggctcaccatgtactatgattatcggttgatgtatggtcctcatttattttattttattttttttgagacggagtctctctctgtctcccaggctggagtgcagtggcacaatcttggctcactgtaacctctgcctcccaggttcaagtgattctcctgcctcagcctcccaagtagctgggattacaggtgtgcaccaccacacccggctaagttttgtatttttagtagagacggggttttgccatgttggccaggctggtcttgaactcttgacctcaggtgatctactcacctccctcagcctcccaaagtgctaggactacaggcatgagccactgagcccagccaattttatttttaattatacaaggaacatgatgaagccagcgcccacccaagccctcctagaacatgatcacaactcacatttctccatatggacctctcttgtcttgtcttcctgctttcccccagagggaagcactgtcctgacttctgtgtttgtagtttccttgcttttgaatcatatatttatagtttttcatatccatatgtatgccttaacaatatgttgtttagtttttcttgttacaaaaagtgtgttccagaaatctcagacttgctttttctcctttaacgtatgtttctaaaatttatccatgttgctgcatgtagctgtagtgtattgattttaactgttgtaaaataaccatctgtgtatacaccacaatgtattttcccattctcctatggataggcatttagattctcctaacgagcttctgttgggtctatatctaggataggaattactggattttaggttatgcaaagtgcagtttataaaatggagcaaaattgatttccaaattcattgtaccaatccttactctcaccagcaatatataagagatcctgttgaaccatcttatctacagaatctggtattgtcaagtttcttcagtttggcaaatccaggtagccttgatgtacattttcctgtaactaatgagattgaacatctctccatattttattaaccaaatatatttcctcctttttgaaataccttttcctgtcttttgcccatttgtctagtgatttgctttcttcttctgatgatattgacaattgtgtcttctcctctccccttttgttcctcatctgtctggctagaagtttattgattttattgatcttttcaaagaactatgtttgcttctattgatttttctctactgcttgttttctatttattttttccttcattttattcatttcattccttctgtatactttgtgcttaatgtgcttgttgttttgttttgtttttgagacagagtcttgctctgttgcccaggctagaatacagtgacatgatcacagctcagtgtagcttcaacctcctgggctcaagtaatccttccacctcagcttcctaagtagctgggactacaggtgtgtgccacaatgcccagttgtttttgtttttgttttttgtttttgttagagacaggatttcaccatgttgcccatgctggtctcaaacttcttggctcaagtgatctgcctgagacagtctcccaaagtactgggattgcaggtgtgagccaccacacccagcctcctgctcttctttttctcgtttcttaaggtgaaactcctgtcatgatttggaaccgctactcttgatttggaactgctactcttttctaataatgctaatgctgtaaatttccctctaattgctgctttagctgtatccacaaattttgatatgttgtattttccttttttttttttttctgagacagtgtttcactcttgttgcccaggctgaagtgcaatggtgtgatctcggctctctgcaacctctgcctcctgggttcaagtgattcttctgcctcagcctcccgagtagctgggatgacaggcatgcgccaccatgcccggctaattttgtatttttagtagagatggggtttctccatgttggtcaggctgatctcgaactcccaacctcaggtgatccacccaccttggcctcccaaagtgctgggattacaggtgtgagccaccgtgcctggtcatattttcctttttaatcagctcaaaagattttctttctctggtgattacttctttgacccctgggttatttagaaatatgtttaattttgaaatattgaagaattttctagatctttttctgttatacctttgtattctaattcttttgtggccagggaacatactttttaaatatatttctactttttattttgaactaattttaggcttacaaaaaagtggcaaaatttgtacagagaaattttatacattcctcattcagctttccttaaggataacattttatataactacagtacaattgtcagaaccaagaaactaacattggtacaatacttttaagtaaataccacattttaattttgccagtttttttgttaaatcatttttccacctcaggatctcagtccagggtcccatgttacatttagttgtttttctgagctccccttaatctctaataattcctcagtctttccttatttgtcatgacctgtctactttgagagattattgattggttattttatcaaattccccagatttatcaaatctgggcttgtctgatattttttgattggaggtttttgtctttttgacaggaatacacagaagttggatcctacttcgtgcatgatattacggagtttatgatgttgacatgtcttcatactgatgatcttgatcacccccctctgcctagttttttaccataaagagaatatatttttctttataaataataaatgtcatgggcgaaatagtttgagactatgcaaatttgtttttcctacactttcatcattaattttagaacccatcagtcgatttttgtctgtgacaattactactgtggtgtttgtctcatggtacttttctacttccctcttaccttctgcatttactcattataattctactatatgaaagagctgtgccttctctcctgttatttattgaatcaagtacttacttatatcaatatggactcaatgaatattgattgtataggttataatccactactttcattatttcattgtttcattgctcagattgcctcagctttggacatcaggagctcttcagtttggctcctgtttttctttcaacaagactacatcttttaaattttttgccaacaaaagatgttccaggttcatcttatattttctctgtcttagtcctggactcaatcatccacttatccaaataaccctggttccttttattggagaatgatgtttagaagccaagatctgggtgatagttgtgctcattaatgctggggtgttattgcttctaggccctctagtggacaaagctactaacacacctgtacacaccaaacacacacacacacacacatacacacacacaactttctctctttctcttccatctatccatgccttaagaaccatgtctttatactgatatttcagattaaaattaaacaccataggattctttatttataatttctttctcaagtggcaagaaatctggttctttttataatcttatacatttatattttcataaccagttattctctaattcatttgcacaaaaatttgcaaagttatcatgtatatgtttaaaatttgtatttgattctatgtttatctttctccttgtcatttcacattttgtatatttgtgctttcttctttttatccttgattaaattagctagtattttgtcctttttgttgattttttaaaccaagattttaatttattaattagatctttattgtcttcctcattagtctctgcttttatcatgttattcctattcttttgctttattttggtttgctttgcttttgttgttgttctagttttttgagtgagcaagttaactaactgaatttgtttttcatgtttattgagtaaagtattaaggtaatgagtttttctctgatcactgttttaaatgcatcccatagattctgatatggattgttttcatgtcattaatttttaaaaattctgttatttcagtttgtatttcccttttacctaggagttgtttaataggctttaaaatttccaggtagaaggacctgtatttttttgatattattaagatttcattgtgaccagagagtattgtttgtataatcatttttatttctaatgaaagttactgacgttttcttcatgatcctttattgtgaatctgctgtggacatttaagacttctctgttatcaatctatgtctataaaagctatcctattacgttcagattttctctccctccctgccccatcatctgtcctgtagtgaaaattattattattggtgtgttaaagattattggtgtgtttctatcttctggtatctgttgacttgtttcttcatggagatggttgtagtgttatttggtgcataaatattaataagttatatttttattctaggttgtggcttttagcattaagaagtatccttctttgtcatgtttaatgctctttggcttgaattctaccttgcctagtatcaggatcactttttccactcatttgattttggttttttttttccacttgttacatataatttatttttagcctttccaaatcgctttatttttagcctttctgaatccctttaatttagatttatctcttttatacagcacatagttaattttgttttgtgagccaacttctaaatctttttttaaaggtgagctaagcccattcacatttattgttataactgacaggtttgatctcaactgtatcataatatttatgataatgcatattttgttaatttgctgtttttcttaaaggatagtctttatgtggtttaaatccacttgagtttttgacacttgttttacgggccagcatatggtttatcttgttttttgtaattggtttgtaagagctctttacatattaaggatagagatcctatgtcaaatgtgttgcaaatcattcctgtttgtttctttctctatttttatagcacttctccttgcagaacagggctaactcataggcagtgctgccagagttggccctttctgtttctagtggatgtaaagggtaattgtctgaaaagagacagttaaggaaaagcaacatattaaaaagagtgaatatttccctgttattcacatagactacttgaatctactctacctgcgactgtcttcatttagatcctcataatttctttcctggattattaggcaactcagttaatgatttgtcaccaaaagtccttgtttgtagactatacgctaccttcaagagtttttcttaaaattatttggttttgttatttataaatcacataacacatttataaatatgatttacaaatttcctgactctacaagatagatagatatcaattattcaaataacaaaatgtggctggtgctcagctctcatatggacaaatgttaataaattttcatgatccagttgatgtgtctgagtggtgatagagtatcatgtatgatacagtcactttatgttatgaaatgatttatccagacaggatgatcaaataccctgtgcatctcctaaaagttataagggaagtgggagtaattaacatcaacagcacgtctcgtctctctcctcccaaccccagcttgtcacactcctgtcacactgcattcaaagctctttaatcacctcaggctctctcaaacctccctgcctcaaccctttacaaaaccctttcctcaacccaatcccttgtcttagctagcaatttccaactcattcatcaagagcctgcttagctgtcatttcttggttatggtggcggaacgtggggtcctccaaggtgtgcgagtgttaactgtctgggaggagtagcactcctgcaccgcccgttctagaatggctccttcccatctttcaggattcttcatcctacaagtcacgccagccaggaagccttccctggacccttgacgtctcagccaggagtctattctgtgttctggatcatcctttattttcatttttattctcctacagggtcattgcctgtctcccaggcaacttcccccattagaaagggggctttctggagcaggaaccatgtctttcttgttcactactgggtctctagatcttagcacagtgcctgacgctgaaggcagaagaaagattccttgaaagataaattcaggactgtggctggtgctcagcctacatgtactacatgtagtacatgtaggcatttcacattaatcaaggtgattatttaagcctcagttcctatgtctacaaatagagaaagggttatggtgagaattacataaaaccacatttgcaaaatgcttaccagtgagctcagcacttagtgctcaataaatgataacaatgaccatcactactcaggaattaccaacgagccccttctgttgcaaaggccatctctgaaatgtagtttgagaaagtaactaaaagactataagcataaaattaaggttctttgagaaaataacccatatcagtcatccagagttacagccatattaacagattcacaagctctggccagtagtactgatgctttactaattggaaaaattaatattccaggaatgttctagacacctcactttgaagaaacactaaaacttatacttgaaaaaatatgatcacgagtggtcttggcagagttccaaagcaaatgtggaaattgaagaattcgaagcactattatcactctgagaaagcagctggcttctcaaatatgaacctaccacttggtggaagtaaagctcatttgtgtgagtgacaagtgcaaaggtcatatcataccccatgctaaaaccttccagtgtcttcacatcacacttagaaaaggcccagctcttcaccacaggcctctaaaccttggtgatatggcctctgccagcttctctgaactcatctacattcctgccacaagttccttctaatgcatctcactcctcctggccccagggcctttgcacttgctgcctagagtgctcctccttcaggtctttgcacaactgctccttagcattttggtcttcttacctccaatgtctcttcttcttcttcttcttttttttttttttttgagatggagccttgttctattgcccaggctggagtatagtggcgtgatctcggctcactacaaccttcgcctcctgggttgaagcaactcccctgtctcagcctcctgaatagctgagattacaggtgtgtgccaccatgctcggctaatttttgtaattttagtagagatgaggttgcgccatgttggcaaggctggtctcgaactcctgacctcaggtgatccacctcctcggcctcccaaagtgctgggatttcaggtatgagccaccacatctggcccagtgtcacttcttctagggaacctctggcctgccctaagtgcactcattccaaacgctgcctctgtccctttggcacttgtcacatctaaaataaagctattatctaaatatttgttgtttgtctctctgtgaggaagtagacattgtctatcttgtttaccatgtctgtacctagaacaatgcttggcatatagttggtgctcggtaaatacttgttaacaggtgctgcgtctggctgcgtggacagtctcaggtgtatttttctccaaggcacttggtcatcagactgagtcctgccctgatcagattacacccagctcattgaagctatgaaaatccccaagcagtaataacaatggtcaacgaatatctgcttgtttgtgtacttcatcttgttctggaaaggagctgtggtagagcagtgcacacgagttaaagaaacaccatgagcagacatttaggaccagaaaaagggccatttgcccaggaggccaacgtgggagaaagtgaaaggtattcaggacatgaagtctgaagagccacaatgactgcactcttactgtaaacttgttcctgagcttcttggcaggtatttctctaactctctattgtccacaaagacaaaccattccctttttccaagagaatcacagagttcttatttgtcacctggggcaggtaacaaacccaatgaaagatgaagtggatgatgcctttacaccatatcccttccatccactcagcaactggttccataaaattgtttcctacaaagcctggaaacgtggcaggacaccaaagcacactgacgccatgaatcacggcagctgactccgctccaatagctactcgcacagctttttcaccttatgtggatcatttctcctttctgagtggtagctttctcatctgaggagattcatggtattttttcctgaatcatattgacacatcacacatcatggaaagacaagagaaacattattattatctttatcacgcagaccgtgttcggagggtgagcagctggaggagtattcttccttgcagtttgtccaagacatgggcaaacttttgatgaacccacaggagacctgtcttctgctggctaatttactggaacgctgttgggaaataggaaccacaggaagacaaggcttgatttcccaggacgagcgggtgagggaggtctcccctggacttggagaagaaagggtaattatgtttcatcttctcttagggcaaattgctgctgtggacctgcccacatgggggctgagagccccggcagctccaaggccgactgtcattttcccaggtgcgagggtatctttagtaagtgctcctgggaaactgccactcacactctgcctggccttgtaaaggattccagaaggaagaaccagagaagggacagagcaaggaggagctggctttttgtatggctgctgatggcccccttcacttaaccccggtcggcagagagcctgggcagccgctgggaggtctgcatctggctctcttggtgtctggggtagagttcccatcccaccaggttggggccctgtcactggccagagcctgctggagccttggattacagggcagcaggagacgtgcagagaagcacacatctattgagcagccaccatgtaccattttccatggcccatgcgctttcttcccattccccagagcacccacgaagctggaactatctgacagatgagaacatggagacttagagaagggaagtgatttgttcagtcaaacagccagcaagcagtggagctgggatttgaacccaacttacagatttcaaaaagctgtgcagttttgtggtgagggctaagaagggagagtaataggaggtggagaaggaggagccaggcaggtaaatgaaaaaggaaacgggttccttctccgtgaaacggagctagacgagcagctgattccagaggttgtgacgattctacagaaatgcatggttggggttctcagcccagcgacctccacggctcttgcctgtcagcccaccctctggcttccagggtcttccctaggggtccctagtttcttgcttcccatctagaagcaccccctccttccccaagtgtcacctccctctccccgtcccccaccccagcccagaccctggactaatgcattgcagcttgagcttgcagccagcctgctggctcctctgctctgctcgttccccgcccagctcagccatcacttccaatcactccagtacaaaacattctgccagatgcagcctgccgacatggtcttgcctggcccttggtcaccagcacctggttgtgagctcagacctgtgggggtggatgcaccacagactccaaggtcaatggctcaccaaaccctctccctccatgaccctggggcttttgaaaagcaccaacctgtgcactgtacgtttcctcaccaccagtatcccccattgctcctttcccagtcacaagggaaaaccactgtggacactagccaccacatgcccctcagggtatcactgtttctttatggggaaggaactgccatttcttgagcatctctgtgcaccaggtcctctgtggacatttcctcataacacctaggggaagaagatactcttttttttttttttggagacagagtcttgctctgtcgcccaggctggagtgcagcggtgcgatctcggctcactgcaacctccacctccagggttcaagcaattttcctgcatcagcctcctaagaggctgggatgataggcgcccaccaccatgcctggctaatttttgtatttttaatagaaacagggtttcaccatgttggccaggctggtctcgaactcctgacctcaaatgatccacctacgtcagcctcccaaagtgctgggattacaggcatgagccaccgcacccagccagaaggtactcttatccccaggttacaaatgggaagactgaggcacagagagggcatgtgtctcttcaaggacacagagcattcctcctctcttgctctcactctgtatctatctatccacccaccataagcatcttccatggccaggcactgcatggatgatgcactgggttgaattgtgtccccccagaagagtcctaactcctgatacctgtgactgtggcctcatttggaaatagagtctctgcagatataatcaaactaagatgaggtcatatgagatcagggtgggccttaatccagtgactgctgtctttataagagggaaatttggacacagacaaacacagagggaagaagccatatgtaggcagaggtgggaactggagtgatgcagctacaagccaaggaatgccaaggactgccagcagccgcaggaagctaggagagcaaggaagaattcttccctagggcctttggagggaaccctgctgagaccttgattttgaacttctgacctcctccagaactgttgctttaagccacctctttgtggtaatttgtaatggcagccccaggaacctaatacagatgatatttaatccctgctacaaccttgtgaaatgggaacaattattttttacttaacaaacgagaaaactgaggttggaaagggggaaatttgtggctgaaggtcccacagccagctgagagcaggtccacaatttaaacccaggtccagcaaacccccaaacctgcaccccttaccagtaatggatcctcaaacctggatgcactccatcaatacccagagagttagggaaggtactgattccagggctttgtctctgaagatgcccgtgccatttgtctgggctggggccctgaactctgcattttaacagcacccctggaggttttgaagcagccgttagggaaatgtttcttaccacactcctgtcacccaaagaagtgtgtctgctggggcccaggagtcaggtcacttgatggtttgtcacaaagagggagaagtgggggtgaggtggagaggtgagtcagaggcagcagtgggaggctggggccaagtggggaggacacaccctccctatctgcccagcgaagctcagcgcacctgttccacatctcacggaactcacatccagccaccccggccctgcccttacatcatcctgggacctcaagccctgggacttttgtcttcctgggcctcctagagcccctgaatattagatggggaattgctcatggggtgtctcatccagccaccccaccccactcccacccaccaccgccactttatggctcagagaactgaggcccttagagggaaagggtcttgtccggaacctacccgaccaacccctgacaaagctttgctccagatccttttctcctgacttccagaacataccgtgtgaagccagcagaaagcagccgtgcacagaagtcaggccaaaaggcagcagacaaagagcctcaggaggggtgggcagataaggggagggatgagaggggagggcttacacaagctgagcgcttcgtgtgcagcaccgctaaaggccgcatgtcatcgccacactttattatatgatgatcgtgtgtgtccatttgacagatgcggaaacaaagccttagggggtgtaaagccagctgcccaggctgtgaccaccagctcacacgtgcctgagctaggaggcacacccagccctgctcgcctctgaagcccgacacccttccctttgctgcccggcagctcctccaacccctcagccctgttcccaggccacaccctcccacacaggaatcctgcctgcaaaccaagcgtgagtgccattggcgagaggcacaggcctcggagcgattcgttgacagcaagtgctcagctgggctgcacagagagccatccagcgggtgttggcagcagcagccctccaccccccaccaccaatatttcaaaggaaagattgaagccacatgtttggaggccataagctgattgctagaaggacgtttcatataaacagcatgaggcagggcctgtcacttggactcacctttggttcccaaccctggctatagctcttaaagccagctcccgccaactccaccctctcttcaaactctagacccagaaccctgagggtcccgagcccaggctcactgggaaagggttaaagcagaaggcagcaggtgcaagggcagagaagagacaagttttcctgggaatgagggtgggtgcatgggaagagagaaacgaggtgcagttctggccaggccagcggagctcagggaagggctgtgttctaagcagcctgcgccctcctccctcccgctgagtgcggagtctggggtcttgcttccattcaaccctttatcccaggcaaactttcttccctctgtggctgtcagagtcctcttctgagacaggggggctctggtggtgggggtctctcccagctgcgagttcttcaggtcttggagacccagccagctgccccaggcaggggctgagcctggaaagcagccccctcagagacacaggtggggccaggggaggaggtggcgggggtgggggatggggggtgcagtcgggggatggagaccgctgggccacacgggctgagggcttagggttaccagagccagggcagcacacgtgtgtttcaaattttctttcaagtcttctcgaggccggcttgctctcatccctccccccgccccctggctccgaggctgtaatcagtttggatggagcacagcagacacgctgtgggggaggggcgtgtggggagctgtcggggctgagaatcattttaggattttgatacctgccagcagctcgcaggcccatctgaggcaggggacatgaagtcctggacactggctatgcccagactgacccaagtgctcgccagtggcctgttgatggggatctgaaggggagaggaaccagtcctggatgtatgtagaaggcactggaatctgacagctcaggctcctgtcctggctctggcccttgcaggctgagcggacttggctgtgtcattctacttttctgagcctcagtggccacgtctgtgaaacagggcttcaatgtctatcatggctctaaaagttaaataaaatatgccttcagaaagcttagtgcagatgggtgatctggcagggactcctttgccctctggagaaataggaggaacggatgaagcagggtcccttgcacagagactggaggctgcaaagtcaagccttggactgctgaggccattagcacagcataaatgaggactaaatagcaagtcacatttcctgcgtgggtcccagtctgcagctatccgtgaggggtgacaaagaggctttgcttggccaggcttcagtcaggctccagaaccttctcctaaccccatgcgtgcacttccttgtaaaatctagttttagcaccttgacataggatcaccctcatatccgatcaggttcctcattctctaccatgccccaggggatgtctggtcaccctggtctgccttcagcaagaatccccttcacccctgatgtttcctcttgggccattttccatcccatgaccccctccctgctcctcggctataaactcccacctgcctgggctgtattcggagttgagcccagttctgtgctgaggtctctgttccgctattgcgatagtctgaataaaatctgtctgcacggctttaccgtccagctctggttttctttgacagagggcggtaggcatctatgtgaggcaacagccaccgccctgttcccgaagccaagtccacactggacctgtcctctcctgaccacgcgtcgctcagcagctgctcagaggcatctgggctgcttgctttgacctctaacaccacctgcatttgaggtgtggggcttaattattctccttgtccctccatctggggctgccactctagataactccaggtcccaggccacccactctcagcctttgtaaggtcacagggtccccggagaaccagatgaaaatgactctccctgtcccagggaaaatgcatttccacctaacattctgccacgggccccttggagttcctaaattaagaagatccctgcttggggttttaaactccattcaccacacctgccagaggaaaccagccctcaggctgagaacccctgctctgaagcttgctcaaggggagatggaaggctcttgcagccccatggttggaccctggcaaagcgggctcaggaactttgatgtttagcccctcaaaagggcaagcaccacctggtccttccccagggctacccacgtagaaggcctttccctccccagacctcagaggacaccatcgattctgcacttccgaaccagaggatgtgctggttcctgtccaccctcgctcacaggtggggaaaccaaggccgggtcatgggggctttttccagctcacccacaggttttagagtctgaggcccagagcacccagtggacctcgaccaggggccctggctgacgttgggtcagccagctgggccatggagaggtaggggagtccgcgttccctccccgacccccagcttttgttagcaaccgatggaaactggcaactcggagagcagaggttcccggcttgccagatcgtagctaggagaacagatggccaattcatcccaccaaacttggcacctccaacaaaagaaacaatatgtatttggctccctaatcttttcctcaggttcccaggcaggtgactggaaagtctgatgacaagaaagcgtcgactcacctctctcagggcgcaaaccacaaggcaggcctggctattgttccactgccccctccaccccatcctgctctccgctctctgctctcctccctcctcctcccctttcctggggctgcccaggcctatctgcagcagctcagggtctcccccagagccagtccctggtgaaggtgggctggtatgcgggcacagggaggtgcccattctctgagtatcataccccttctctccttccaccctcacaacagccctatggggatagatactgttattgtcccactgagcagatgagaaaactgagggattcaccagtaggctgcataggctttctgcacgcggcagagctaagaatgtcccttggggccagggcaccacctgacaagcactgcccacttgccagatctcagagaggtggcatggcctagggtgtagacctgggccccctcctcaccaggctctgctcctctggaggggctttggtgaccgggggagggaaacactcccattgagaagtctgaaggtgcgaccaaggtttcctgcagcaccatgaatttgggaaggaagggggctcctttgtaagccctggagatacacaactacagctgtccattattgagcacctactgcatacttggcacttgataggtgctccatgtgggctccccttaatgggctctgttttgtatgtgctgtgaccctagttgtacagatgaaaaattggagacacagaaaagtgatggtttgtgaaagtcacacgaccagttaagagcctaagctgggactctttccactgcctcagctatttctctctgtcctccacccccagccccagggagggtgttaatgaggcctgcacaggagagaggcaggggtgaggagctgtgcccgcaggtgcctgcaggtcttcctgcagtggccagcccagggcctggcgccactcctcccctgcctgtctgctctccccagcatgtgatggtggctgataccccctggggtggggtgggggggccctgcacgagtctgggccctgccacgacgccaccctggagacccagagtctgtctcccaagaactgcagtccttcccattctgggatccctgggcggggtaggtggggcttggggaatactcagaactggctcaaaggactgggaagctcctcgagggccccagtgggttgggggggaaacgtaagctgcaagacctcagaggcctggtattctattgtctttttctgtctttgtgcccagctggtcctttcactcttttcctctctgtctctgggtggctcaggggtcatagtttgtgatgtgttggctaaagtaagaatgagaagccaagagatcccattttagcctcacttatgctgggtgaccctagggtgttcttccccctctctgggcctccagctgctgggccacagcttagagcccctcagggcccttaggccctgatgcccaggccatcccagggcagtgaagagctcagaagacaatgtttgactgttttcttcatacaaggaacatttgagaagcacttcctggctctcgatggaaagagatttaaagaggaaaataaagcaagcatggaagtacctcttattgacaagcccaggccttgttagcttagcgtctgctcctgctctgcttctgtccctctctgtgacttgggagccatttctcaagcccccagccctttccctcacgatcttcctcttcaagttcctgctcaggaaagtgtgcttcgaaatgtgggcacaggggagagtcaaagtgagaaggttggcaaagatccataggaagaccccagaaagtggccaagctcctacaaaaacatctcaccaccaccgctgccaccatctcgtccatcaccgctatcaccaccatcatcaccacttccagcattatcaccactacctccgccatctcctatgtattactactattgtcaatagtagtatataataaaagcaacaacgaattctgttgaatgcttacccaatgatatgcatcatactaacttaaatactctgtccggctgggcgcggtggctcaagcatgtaatcccagcattttgggaggctgaggtgggcagatcttttgagggcagttcaaaaccagcctggccaacatggtgaaaccctgtctctactaaaaatacagaaaattagctggccgtggtggtgggcacctgtaatcccagctacttgggaggctgaggcagaattgcttgagcctgggtggtggaggttgcagtgagcaggtattgcgccattgcactccggcctgggcaacagagcaagactccgtctcagtaaaaaaaaaaatctgtccaagtcacacatgtagtgccttagtctgggttctccagaaggcaaccttgaaacaaggacgcaaatgcaagtaatttatttgggagatgaaataacaaagtggtatgatatcaagcaagtgacaactgtggaaaaatggagcttaatcttgctgggaactccaggcaccagtaaagaacacccacctcagagtcatcccccccaaggacaacgaagctggggtatttatacaccaactctggctagccgttgtttgggggctgcctccaaggggtattaatgccccatcacctccagccttctacacatagagacagacaagggtcagctgcagaggaagccctcaggcaaaaagatttaggttctggtagttggaactcagacctatgtgcatggagatggtaaggactgggaggatgtgggaagaaaaatgaagtatctgctactggtagtatgtggtgacataaggattcgaatcctggtcttttttattttggtgtctatgaacagatcagcatatggctggctggctgaatggatgaacaaacagataggcagatgggtagatatatgaacagatggaaggtggacgagcagatgattggacaggtaggtgttcaaaaaatggatggttagatggatgagcagtggatgaatggatggatgtctgagtgggtaggtggatggacaaatataaaatgaatgagtaaatagatggagaatgagtaagtcagtggaaggatggatggatggctgaaaattttaggggatgggtaaatgggtagattgtttaagaattgtatctgtgactggatggctggatagaaagatgagtagacagaggagaggtaagtatacaggaagtaggatgggcaggaagtgggttggaggatggatgatcaggtttggaatcagagaagggccatggctaagtaaaacagtgcctcaacagtgatcttgaatgaagagagctcagctaatgtcacccccatcatacctcacctcttactgctccaggaaaacgctagtctctaagactcagaggcatctcagctgtggcttaatgttgatgaccaatcccatcaggaattaaatggggtccagggaagatccagggtggctgtagcagagggcatctgttggagaagcctgtgagatggaactggaagagtaggatgaagcccactgggtcttccacctggaatgttgctgccctgcccagagctggctgggcatttgtccaggagacaccatcatagggctggctctggccactctgccctgtggtgggatgctgaacatattcaggcttgcctcatcacccaagcaaggcaatggctgtagaaggcagctctcacagtgggaacagcactggctcaggagggctaggaaaggaaaggaggctgacatcaggacgggaagccctgccatgttggcaaagccaagagaagcccaggaacacccggctccagcccaagcacagctgatggcccagctctgccaagtttcactgcctggggcacatttttatgacagaggaataattagaggcaggcctcctattcctggccttttcctggtgctgtgtgtgagtacacattgcacacttgtgcatgctcacacacacacataggttgtatgggtgaacatggatgtcatagtgggtttctgttgtttgcctgtgtgtatgtgttaaggtttgagtatatacgctaggatatttcatacgtgtgagtttgtatgtgaccacatgcttgtgtgtatatgagaacatgtttgaatgtgggtagatgtgcttatgtgtatgtgagcacattactgttcacgtgcttgcacatgcatgagcatatgtgcatttgcattagcatgttgtgtgtaaaggtattcgcttctgtgtattggtgcatatacttactgtttgcatgtgtgggaacttgtttgtgtaagtgtatgtgtgtgtatgcgtgtgcacacgtgcatgttcaggtggatctgagtgcttgtcgagggatggagttcatggaatgatgggactcacatactccagacccagcctcaccttttatgatctaccctccaccctcgacctcactctttcacacaaactgcaggagccaaacaactagtagctacaccaacactctaggctgtttcaggcctccgtgattttgcttgtgccgcctggaacaccgtactttccctttctccttggtaaagcttttgttcatcttccaggtccaggtttcataccctctgtgctatcttcctgggtaccacagactctatcctctgagctcccttgctccctctcagacagccgtctcttaagccatgaggtattctttgttcttcctgtagactgggatttgcttgagggcaggatctatatgtaattcctttctggaaaaccagggattgaaacaggatctggcatgcaatgggctggatgggtgaatggagaaatagatgaatgacagatggatggacaaacagatggaaggaaggatggatggatagatggatggatggatggttggatggatggatggatggatggatggatggatggatggatggatggatggacagatggattggttggtagatgtgtggatagatggatgggtgaacaagcgagtagatggatgagtaaatggctaaatctggtgcttttcttccagaatcctggattctgaagggaggctttgcagcccttcctcgtggatcacttgctctggtacagaagaaacagtctctttgcttgcagaggaaggctgcaacctcagagcctgcctgctttctccccgctcagccctggctctcaggagggctggctccagattggccacctaccttactgaggagagattaggtctgaagaggccttgctgagtggcttaagttagcccctgtttgtgttcctgggctttcaaaggctggggagaagacagaggaggggcctgacttcaggccccacggctaagtggggagggattgtgtatcctccaggcctgaactgcaggcagctcaaagcaggaccctaggagttttgagacaggaaaatggtgttttgtcttgttaatgattcacttggctttgaactggagagtagtcaggtgtccccagacggcggcttttgagctggtctaggggagggggcagggcgtactcaggccccggattacagaggccttcccgggggaagggggcctttgatggggccgggtctgttgtccggagtctgctttgctggtggctggagccccctaatgagggggaaagggctccgtttggaggcattcccctggcctcccttgggcagcaggcggagacctcctttgatgtcgtagtccttaagccaagtggggactaattgccacaaggtacagaatgttctggttgcttggggggtctgcagcctgctcacaatgccacagccaccctggggtgggggaaaaggcagacactctcctgatgtgagacaactcaggggcatttgttgtgtttttatttttccttcatgcacagagccacagacagaatgggaaacccactacacactgcacactacacacacacacacaccttactccactgcaagtttgtaaacagtattatgcttgaaagcatacgttttttaaatcaaagagtcaatgaggtgggaggaataatggcaacgagaaaaaaaagcagacgttgacaggctggcgccagacagatttgggttcaagactcagctttgccactcacactttgctggggcaagtcactggactttccaggcaccagaacgctctgcagatgcaagagctcatgcctgacctggagtaggtgcttctgtttttgtctgttgaccttctattgctgaggcaactgcatgcttgaaacagttcactaaaaacacaggtgtgtggaactggccattccacatggtgtgcaggcaagaggaaaacctgtcaggaaacgtcagatcattctcatttgggcaaagagcagggagaggatggtttcctttgaattttaatatttgtgcccacatggattccatctcaaaggaagaagatcttgttttccctgggctgtgctcactccatactcctctctagatctctagatctctgtggactctagagtcagagcaattattattattgaaagaaaaagttacagtcaattattgtgtttatacatgatatcaggcacggggctgggtgatctgactacattattcctggacttcacagtgacactctcaaagagtttgtaactcattttacagattgggaaaccaagattcagagagacaaatgacttgcccaagaacatcctacgtggaaatgggggaggcagctttctgcctggcctggctccagagcctaggtcctcccaagcccaccccagaggaatgaactgaacaagcttctggtagcttcatctccccatctggtcaccaggaataataatgggatgtcctgctgggaggcagagcctctgcaaaggtacccagaggggaaccctgtagacgtggcagggacctggaacacttctgctgcctcccttccaccctcatcacctgcttcccccaacaacacccccgccccaccccccacagatattccctaccccctcccccaccacatccactatccggaacctggagaaagggagagctggggaaatgggggtagtgatgtccatcaagttgttcctccagactgtggtgccccttctttgtggttccattctgacctttggcctctggatagggaccctcctgccggcccctaccagtgtcaaaaaccaccaggagaagcttccaggatggagaaaagagaaggacctgtctctctggctgtccctcagtaagcagcagaagagaaatagctggaccctgatgttccataaacacaagccggtggcgagcccagtgaggaaggctgtgggagaggaagcgggagcagagagggcaacaccccacaatctggatatggcaacccttagttacacgcgagacggctctgagaggtgaggcagtgccacggatgagctgcatagcaggaacccagagccagcttgggctgactttggacacgaggctaagcccaggacctgggaatgaggaagcggctgagaatgagcctccaatggggcttgtggtcattgccaacagtgtggtcctgaggaccccagctgagaggaggtgcccccaaagggctgtcatgagacagacaccgcaactgtccctgggaagggagggtctgtggctgtcctacttgttccctgtcttgggggagagaattgggggtgtccctggatgagcggagagcccctccggaagcagaggcaccatcgggacagaggaaaatctaagaagctctggcacagttcctgcttccactaccttcacctttcttcttcttcttagaaaatatcaatgtggagacagctttattgttttagagcagtaatacattctcctttttttttgtaatgtcaaaatacaggtaggcaaaaaaagagacaataaaaatgcccagagaaggtcactgtccctcaggctcacttggtgtatatataccttgtggaacggcgattgcttctcccctgcttaacacattgtgagcacgtttccgtgtatacacacctctatcgtgattttaaatgcgtccataacattccaaggatcatcacagttttttaaaccaatgccctagtgttgagcatttaggttgtttccagtatctcacggtgagacgtctttctactcctgagactccctcccgagcagtggtgttgctgtgttaaagagcatgagcattttgtaagtctttggtggccaaagtgtgccctgggaagatctgtcactctaccaccccagaaagtatccagagtgctgttccttctcactgtgttcaaagctggatatgagtgatcactttttaatcttcggtgacccgataagtgaaaagaaaatcttgtttccacgtgaatgtctttgactactgcctctgctttcttcattcatttattcaacaaaaatgtattgagtgcttatcttgtgccaggcatcctctattgcaggaagggtggtggtgcatattttaagcagaaaatcaaacaatctctccattacgattgcagtcagtgttatgaggaatggtggcctgggggagatgggctagtgggagctttggcctcttccacaatctctatcagatttgattttccttgctatggaaaatggacccttctcaatgtcatataaaattctctgtaaatgcagctgcatttcaccctcgcccctacccctctaaccagatattcttctaagcacttccaacaaagatatttccagcaaccttgttaagaagagcaagtgcaaggggctatttctctggcaagaaagtctagactattatccaaggcctgtttggggtgcattttcttcaaaaagcctctggttttcaccaagacaaacccctctctctttatcacacactgaaaatctctttaaaagactcaataaacggagtaatagaatcaagggtgaattgtcttctcccctccagtgtaggtggacagaataaattctctgcatccccaggagctccaggcctgggatgtggtccatgagaagtaagtaaggtgggtgctcttacatacctattgttttcaacatctttttcaactgggagaatctttttttttttgagacagagtctcactttgttgtcaggctggagtgcagtggcacaatctcggctcactgcacactccgcctcccaggttcaagtgattcttctgcctcaacctcccaagtagctgggactaagaggcgcatgccaccacccagctaatttgttgtattttaagtagagacagcgttttaccatgtcggccaggatggtctcaatctcttgaccttgtgatctacccgcctcggcctcccaaagtgctgggattacaggtgtgagccaccatgcccggcctcaactgggagaatcttttcatgataactgaggttcacagaacactttctgggtgcttgcttgaattcacagataagacaatgaatggctcagaagggttggaggccagcccaaggtcacataagcaggaagggggctagatgtgaatccaactcccctggaccctggggcaggacccatgctcttgcattacagtgaagttccaactctgtgcctccttccttcctctttggaactaaacccctgggagtccctggccttttggattctgaagcttctaaggaagggattttgccagaggtgccctggcctggcacttgttggtaccctcaattgcaaactgagtccagaagcctggcagccagagtgtctgtccagataggcatctgggcagtgcccacagatggccccagtgtgatgggcaatgcgttaggcatactttccttgctgactgatgtcatgagctcattagagcaacggggtttatagtacaaggcaactatccagacaataaattaagctgcacaatttagcacttaattatcctctctctcatctacttcactcttgttcccgggtgtctgtctgggccctccagctagatggtaagatcttccctctgcctcacgccccacagtcaatccatcatgcagccccgttggggccatctcgggaacatctctcaaatactttcccttttccacatccccacagccttgaccgcagccagctctcactctctctccccactggattattgccaccctggtctctcccgcttcaattcccctctctgctccgcccaagttacacaagcatggcttcccttggtctgaaatccaaagtcccaaaggtcttggcatccaaagcccttcatgcccagggtgtcttgcctgccttaccagcctcctcttcccaaacccccatgttggctgccctcccgcgcagaatactagcttgaagatcttcccttattaggatcaaagccagcctccaggctatttcaatacacgaacttctgtatactcagtttcctccacgtggaatatccccctccccacactgacagccctgccactcaatttgcaaactcattctcatcccagcagcctgctctggaatctcctccttcaggaagtctaggggtatttacttggcaagccctacagctgaatctcttcatttcccatcccctcaaagcccaccccagaggacgcgcttccacagggatgccccagataataagatcaacaggactgtctatctgtggagggcatggatggctacaaagcactctcccacccttgcactttggagtccttattgttaaatcctcagaatcaaaccaccaaggatcccttttacaaatccttttatagatgaggaaactgaggttcagattacagagccaggtccccctgcccaaccctgcctacgtctaaagagcagggacagtgttctagggctcagggagaacaggcaagaggaccccatgggggcaccatgatggggggacgaccatggaggacagggatgggggacagtctgaagcagggctgtcttttaatccaaaggaggcttggctggtcaaatcacagcacctccaccaggcgttcccttctgctcctccattttgcaggtgggtgaatggaggctcagagagagggagggaggagcagaggacaaggtcacagagaaatagggaccaagttagagtcaggtgtcctggctcccggtccagctgacccagtgggctgcaggtcagggaaatcacgtggtcgctccttctctctgtcctcccttccccgagggcttcctccatttcctgcgtgcctcctggcagccaggcctcacccttgtttttaaagacacagagggcccctgtctgatttcctcattgtgcctggcacatagtgggtgctgggtaaacactttttttgagtggcttaattactgagtaagtgaatgagcactggaattgtaagattcccagaaggacctaaagccctttatgggcacaggtcacaaccatcctatgagatcagtgtcatcacacccatcttacagatgagggcgctgaggctcacggagggaacagaattcaaccaaagctctatggttagaaagcagttctcagccatcctaggaaataaaacattacacatgctatatatattttaaagcaaggatgttttccttctggtgtcgaaacaggaaaagctccctgagaagcccattgtaaatatcatcgcttcttctcaggcctctgtcagcttatgttattttatttatcaacattcagtagcgtgtggattcaagaacacgtcctcgagtggaacgccaaagaagatgcctgctctaggggccagagcgcgctccgagcaggaagcccggggcgggccgtcatccaggcgcagggctgggtgggcgtgggcagcccttcccagcgcctctgtctgggtggagcggcaggttggagttgcagcggcgtctccctcatttccataagggggagcctgtgcgcaggagatcccgtcccagcccgcgcagcctcgccatcctgggacccgctccgtcaggagtggccattcgggtggcaccagcagatgtctaccctcgaggggagccacaaggttctgtgcaaactctgccttcctccgtttatcctcgtgtccccaaggaaaatgaaggggaccacccaaggccccgtgtagaaagaacgtagctttggggacagacgggactggggcccccctggctccatccaggactagctgcatgaccttcagctggttacctcccctagtcctcagtttatctgtaaaacggagcaataccaattttagaaagtaatgcagagcagcgacagacagtgtctggggcacagtaaattctttaaaataaaagaaatattaattaccctggtgattgttgtctggattattcatgcaagtcctaattgccaccccaaccttcacagaaatttctgctcatccaggtccctggctgagccttcagggtgatttactcaggggctgtggcctccctgggcccagatgtagacaaacccagcagaaaggcattttgagcttgtggttgcaaatataaaaccaggtgcttctcttaacagaaatgatgacagagcaaaagtaccaaagactatttgagagagagagacagagagcgctcatagctgaattcctacccagattcagcaaccagtttctctttttttttttacacatccccacccctagtccacacacgtgttttgggactgtaatataccaggtgctgttttattcctgacgtgctgtggcctttggtctgaatcactccatctccttttgtttggttcctgccagaaagcaaagcacatatttcactgtcccttcccctgggagaacttctttgctggcctccctttgcacaccttcatggagctgcgttcgggatagaacgatggcatggccacacaatctgctgcccttcggccactttcttacacttttcttttttttccccaacatagaaatagcatattctccctgattactaaagtaatacatgtgcatcataaaacattgggcagttcaaaagacgaaagtcacccagagataaccaccgctaacattgtgtcttatcctatcagactttcgtgtgtctggtgcacacacaaacctagttacaacaaggaaatcttacaggatatgctgtcgtgtattccgattttctttgtctgcctatgtggttttcttgatcattctaaatggctcagaatcatttcattgtacggcaatgtacaataaaatgtatatacaccaacatggtgaaaccctggctctactaaaaatgcaatatttagctggacatggtggtgtgcacctgtagtcccagctacttgggaggctgaggcacaagaatcacttgaaccggagaggcagaggttgcagcgagccgagattgtgccactacactctagcttggatgacacagtgagaccccatctcaaaataaataaataaataaaatataatgtatacacaataaaatgtatatgtaaagtgactgacagcatagttcatttaaccaaaatctcgtatttttggacatttaggttgtttcctttttcttttctgttctttttgttttttaagcctttagtttggaaataaatataaattcataggaagctgcaaagataatacagacaattcctatgtacccttcatctggtttttcccgatggtggcatcttacataactctagtacaatgtcaaagtcaggatattgacgtgagtgcagtctgtgtgtatagttctaggtcattttatcccatgttgatgatctgtgtaaccaccaccacaatcaagacacagaactattccatcatcatcatgatttccctcgggataccctggaggatcacacccgctcatctctcctcttcttcctaaccactggcaatcgccagcctgttctctagctctatactcttgtcattttgagaaatatattatatatatatatgtgtatatatatatatataaaacgttatgtatgtatgtatattgatttgatttttcgtgtgtggcatgtgtgtaggaggtgaacgagaggagagtgggaagggcaaagttttctctgaatcatccaaacttgcccagcctagtggctgttcagcacttgaagtatggctacttcaaatggagatgtgctgtaagtataaaatgcacactggatttgaaatccttaaaaaaattagaaagaaagaaaactcatttgtcatgttttgtatcgactatacactaaatttataatatgtggatatatattaagttaagcaaaatatataataaaattatttttaccagtttctctttacttttctaatgtagctactggaaaattaaaacttatgtatgtggcttgcacttgcggttcacactgtgtttcagttgggcagcaagggcccaaaccctccctcccacagccctttaggatccacggtgggcagggacagtgtggtggccagagccaaggcctcagctctcagccaccgcaagacagtcagctggtccctgtggttctggtctcaacagccagtacacaaccacagaccccacagtgtggtggaaaagagcttgaggtcagagagaccttggtttcaatcctagctcctttagagtgttcttggatttgaacttttatccccttccatttccttattcctaaaatgggggaactcaccccataacatttatggagacttttttttattcaaccaattgttactgaacctactacatgctttcgcagcctagaaggaggctcacgtggcgctccagcgctcattggaccctctttgctgcctccagagacactctctcgcccaggcaggagtgcagtggtgcaatctcagctcactgcaacctcggcctccgggttcaagcaattctcctgcctcagtctcctgagtagctgggattacaggcacctgccatcatgcctgactaatttttgtatttttggtagagatggggtttcatcatgttggtcaggcaggtctcaaactcctgacctcaagtgatctggccacctcagcctcccaaagtgccgggattacaggtgtgagccactgcaccaggccctgctcagcacttcttatgagcccactggctgcctgtgctgagattcacctccgccattcctttatgactttagctaagccagtcccttctctgtttctcaattttctcatctatggaatggggatgataacatgacccacctcacagggtggctgtgagggttaaataagatacatggaaacataattcctggacttttgtaggtgcgcaaactggtagcctctgctattattgttattattagtagtagtgttattttctttgttttagaatcccagtgatttcaagggcactcccaggagagacgacctaggaacacagaggaaagatctggaaggatttgtcagtctgcatgtgatgagatgagaccttgggcctttgaggagtttatgaaaaattctattgttcaagtgacaaatatgtcctggacatcgtgtggctcgtgtcaagaagggcctcctgctcttggtcatgctaagaagatgggctctgtcttctctaactgaaaagggttactgctgctggctgccaacccaggctccatcctcctgtttcagatgctgtcgatgccccgcccattgcctcacctccatctgcaaacacctgcaattctctgcctcagggattttttctatctgtggaaacttgctaggtctgaactcagggcaacgttaaagtgctggttaatgtactggaaggaagtatccctgaactcaggataaacagggtgctgtggagaaataccttagcttcctggccctagttcgggttacctccgaggtgtgttccacatcatctcccaggtttctcagtggcctcagctgcagttacccacagtagcaactggcctgatgaaagctgtctttcctcctctgtcccacttcctcattctcctgctggtgtttccaaataaggaagttcaagtgtaagttctgcttctagaagaacccaacaaagatactctttttcttcttttttgcataagttattccccctactacagagccatatgctttggaagaggttgacccttctccaattccaggctatcccttgtaccttgacaaataatcacgtcaggaatcatcagataacttaagtctatctaagcagaggcaagagcatacctgctgctagacatagtcttctcccctctaccagtgagctactggaaaaggtacttggtcctcttctggacattgctatacttggatgtgatgcctgggacttctggtgccatcttgtttggatttttggaatgaagccatcattgcagatgacagagcagagagatggagaaactctgatgacagcattgaactatgggtccaacccaccctgaagccactgtgcctctgaaactcttacatgagatcataaattttaaggaaatttaaagccacccttgaatttgagaccaggtttttattacttgtgtctttctactaacaaaagcatcttaactgctaccccatgtatcttttcagtttgtcttcatacagctcagagagcttgcaattattattgacatcccgaatttgcagatgggggttggatacagatgaaagccctctctaggtgtgggaggtctctttgtgggtccatgcaataactaatctcttgagaaactgcaggtattattacaaatggaaggtcaagttcatgggtgctgtggcaatttcctttataaagtaaaaaacccttccacaaagtgacagtccattttctagtttagaagtgaaataattattgaaggtgcagcatatgtactgctattgtccctatttcatagctgagaacactgaggctcagagagggccagtcacttgcccaaggtcacacagctcagtgggtagaactgccggaccttcagccctgggtctgaccccagtgcttttacctccattccaaccggctcccatggcatctgccttgggcttaaacaaaagttgtgaaagtactttgtagacagtgaggatgctcacttctcagttacctggctctgccctcaccctcaacctaaatttagcaggggccagcaagcagacctcagtccccacctccaccccagtttctttcctttcagagcccaaatccctcatagctgtttcccagaatgcttgcttcctgtgtgtcctccccctattaaaaaatctcctgttgattgaaagataaaacctttcttttcagctggttgcttgtaacgtactgttttctattgctggctgggctccttcaattagttaagagtgcatgagcagcaagaaaggggaaaggaaaacccgtcattgcctgtcagtaacaaacatggctactagggcgttttcccagaaggaaactggagggaactttcttatcagtccagtattgtatatgtgcaatttttgaagataatacttttgagctgttcaaatactgttctttgggctggtgacttttgataccagtagacccaagcgagagagccttagctttctgaagcacttccctctgcaaagtagtctaatttggacaggctgtgctgctcgctggcaagcactggacccatcatcccagtgccacagtgtcatggcttttctttctgggagtctagaaggatgttttcctagaaaaatgcaaataggacactatcttttcttttcctttcctttcctttcctttcctttcctttcctttcttttcttttctcttttcttttcttttcttttcttttcttttcttttcttttttcttttattttcttgagacagagtctcactctgttatccaggctaaagtgcaatggcgtgatctccactcactacaacctccgcctcccgggttcaagcaattctcatgcctcagcctcccgagcaactaggattacaggcatgcgccaccgcacctggctaatttttgtatttttgtagagacggggattcaccatgttgaccaggctggtctcaaactcctgacttcaagtaatccacccaccttggcctcctaaagtgctgggattacaggtgtgagccactgtgcctggctggacactatcatttcacaccattagtcatttaagacaatcaacagtacaggaagggcatcagctagtcatctgggtgaggggtttccctctcctgaggactccaccatcccagcaggctatttatattggggtgccaccatcatatagcaggttgggagtcctgaatttaaacacaaatttaaatttaagaggcagataaatggagaaggaatatgtagtaggttgaatggtggctgtccccccaaagatatgtccatgtcctaacccctggaacctgctaatgtgactgtaatcagggaaagggtctttgcagttgttactaacttaaagatctggaggtgaattcatcctgggtgatccaggtaggccttaaatccaatgacaggtgtccttataagaaaaaggcagagggagactcaagacacacagaggagaagtgggaagagggatggcttttggaagaacaaataccaacatgggttttgtttaatttgtcaaagtctttagataatttgaagtgaggtcattagtacccacataccaatttgaagtgaggtcgttggtacccagtgcctctgcattccatgagagagtccactgtgtggctttgggcgtgatagctgctctctctgaacccatttcttccaccgttacatgacgatgctcatggtgcccaccctcatagccgttgtgaggatcaaggaggtgtgaggtgtcaggggtcataaatcggcagcccacaggtgactttgggacacaggcatttttggtttgtcttatataatttatttttaaatttgttatcaaccttccactaccaggaaactttataccaaaatcccatattcccttgaaaagtcaaaaaacctgccgatctagtgtcactatgaaataaatgactggagttgagttgcagctggccccagcatgggctcttcagtttgccacagtcctcaccactccctattgcacagcatgctcagactccatttattccactcacctggctggcccctggaggcctctgagtttgcaaccttggtgagtgaaagctttttgtaaattcttggttaatttcattttcatttcacaaaaagacaaatcccaaactcatattcttattgaggagagtgtctccagtagggagagggactgatgaaaacctctgtcagatggaatttttttacttaatagagtttgttgtaaccagatcagcaacatcctttcatcgtaggctgctgacttgtggaaatctctttgttacccagaactagacacaaatgatggtacttgttaaaaccaggcgtgctggtggagagagacctccatttatgcttggtcttgccaatattttgatgttccagtccttctctggtttaatagttaagtacatgttcattttggattttcattcaaaccagttcaagaggtgattttaagaaaaaacaacacttttggtttgcatttcgtcaccaaaactagctatgatttccttggagttcaaggttcagaaaatgggtccagttcattgaatcagactcaaaatatggctctgcctcctgctagctgtgtgactttgggctgtcccttaacctctctgagcctcagtttcttcatctctgcaaaggccagaataatagctgtcacatcacaggattcctgtaaggattggagatgacataagttaagctcatggaataggagctggagcatgagacagtatttttcttattatgattgattactcctttaagagactcccctagttctagtttgggaagtagaaatcttagattgtgaagattttattgttcacacacacctgtagtagaattcggccttgatttgcaaaccttagaggtaataatgatgaccttgataataattttgaggggtgatatttactagatattcccttggaacagatgaaatcctcccccttctctcctcttgtcctctttccccttctccgttacaatctttggcacttgagggttagttatgtatcaacacacgatgtcttgggaaatctggaataagaaaatattctcaaagcctcctgatttgcaaactgaatgatatactccctaattttaggtgccagcctgtgtgggatcagatcaagagataatagatgagcgagggttgggggataaggcgaccgttcttcactctttggctctgttccccgtcgcaagaggtttagcattcccgggtccctggcactgaagccagtaatgcccttccagtcattggaacaaaccaaaatgccctcccatgcgtctgaatgtccccatgggagtttgacaaccaccattagccaaatgaaggtggctgatgagaatattcaagctttcctggcctgcaaacttgggccagaacctccattcatctctctgaacctccatttcctggcctgtcaagtgggagcgtcgtgttcaccttgcagggctgttggaaggactaagagggagggtgtatgtaaggggccaggcgtgatcactggcatacagtaagtgctcaatgcatgaggctggcacatattaagtgcacaatgcacagggcacagcatgggggtgcagcagacctcttggctcccctttttccactgattgtgtctccaagtaacagggccaaggggggcattcaaagccctccggacttcattctgccctaattggaagtcattgtggaatgaagtccagtatttaatttggcctgtgtttgacagatccgatgtgcacagcgagcagagctcacacagggcctgtgcgtgatacaggggggattcttggcctgggctcagggcggattggtggagaaaatgtcgcattcaattaaggctgattggccctgacagttgtctgggtgaagtttataaggtacatctaatctggatgcatctggtcataaaaatgcaaaacaagccattcccacccaagttctaactccagatgtgggctgattctcagtgattgacaccatattttttgcagctgtcctacatttcaaatctttttctatttaaaatatattcatcataattatggaatgcaataaacaaacttcagcctgatgacaagctttaaatataagaaagtttcagcttaaaataaatgccgtgatttctcagcccaggacggagacagcaccaacaagcattctccaaaggagccttgaccttgtcaccatgaaccagaaacagttattttctctccagtattgactgatatttggagcggggacagagggagaaaaataaaaaagctatttatatcagatagaaaaatgtgcacaaccatcggaaagccacgcttgcaacacaaagaaaaagaaatagattcaacttaatcatgttttgaaggcctctggtggtgcaggttcttcccagggcagggtagactagaggttatgcacatagactttggggccaggttgcctgctttcaaatcccagcttccacactccacacactggtaccttgagcattgttttgtcacttaactattctgtgcctcggcttcctcgtctgtaaaatggaagatgataataccacttatttcatcgtggaactgtaagagctaaatgagttactgtaaataaagggtgtataacaatgcctggcacataaatgctcaagatgtgttagctatgatggtaatccatatcagctgacccctttccatggatcctccaagggggagagtgaggtttccagagattagatgactcgcacaagtttcatccaacccctggcagagctgacatccaaaccctgatcatttgacttcgctataaaacatgcctgcgggtgctcagtcttgctcatgtttgcattttttttgcctcaatttaaagttttttaaagaaagttttcctggtggctgctctatcagtggctttttatgcattcaaatagtgtcctatgaaatcttggacaaaagagcatccttatgtttcttctgctgctcctggggctcatcttttatttttaatgctatttaaatgagtctgtaattgagatagtcaaataaacaggctattaggttaattatagagagctcagcctacatccaagctgctgggtttcctatcctcttgtggacctcagccatgacctaatgattctaccattaacagcaagtacagcttagttcctcgagaaaaatgagaactacccagagttcatgtcaacaatctgctcctctttaaaatgaagccataagtcacaagccctctgagttcccagagaagtgtctggagctaaatttgtatcctgactgtgataattgttctcctattaggctgatgagagaattagcagagccaagtcctctggggctgtgcccacagctcgggccaagctgaaaatgactctgtgagttttatttgtgagatgtgtaaaaggcttgtccatcactgggcccgtggacatgggttcaatatcaaaatagcatgagccgcctttcccaacagacagactccagtcctggcaggccctctgaatacagcaggaacaaaaaattcctgccggaaaaggtgtagctgggtgttagttctctctacagccctgtggatggctccactgatatctgtggcccgtgcctgacctgctgcactcctgtttgagagaggtagtgtggaagggtggcaagagcgtgtcctttggagacagacccaggctcaaatgggtggactggggtcagcagccccaggtattggtctcagagattggtctgtgaaaggggagaatgggagtaaatagtctctgacttgcaggatcgtcatgaagattggaagagattatgtggggagaggaccaggcttgaagccagtgctcaataaacagaggctgaggttttgattctctggggtcaatgaggcacttaacatggttgtctgggattggaaagattgtttctccttctgtagccagaatggcaaatagattgtatctcccagttcgatatgaatcaattggagatgcctgcttaaagtgcagtgaatgatttgtaatacctgccatggactagggtgggtgataagagaatgcaccccatgtgtttctatctcccttctagaatgtaagctccaaaggcagggactgggtctgaacaacaatccattaactttgtacaggctccaaagcatttttgcatcaattatctcattactctcccccaaaatcctcagacatggtatgctgtggtcccacatcccctggaattgcaaatattctgtcctccaaaagggcctggagtttaaaaactatagctaatgtaataggcaaggaaaaccttattcaccctaatctacagatgaggaaattgagtctcagagggagaaataaactgcccagaatcatacactcagttgacagaagaactagaactcaatttagataatttatttatttatctactcaacaaacattccttcattgcctactatgatcaaattctggactcaacactcatgttgcccttgaagttgcctacagtctagtgggggatattgatgtgtaaacaatgaaattacaaaactgtgtgtgagagtgcaaacagtcagggaagagggaacatttcaactaagttttgaaggcatgagatccagaagagctcagttatggaacttggtctttatcctgagggcaaaagggagccatggagggttctaggcagtgagtgacctaattactgtagtgttttggacaaaccaccaaagggcagtgtggagaatggacaggaaggggaggacttggaacaaggaggccagagaggagttttgtggtccaggtgaggggtactgaggcctgagcaggtgcaggagtacatggggtgggtaggaggtcatgggtaggacatgaaaactccccagaccccagaaggtctcccttctgtgagcaggaatcagaaaggactcagcagaagtctgccccaggcttggaggagaagaccaggccagaaaacaaggccaggaaaggcagggcaaagggttttttagcaggtaagtaggctgtgtccctcatcgccatgggtaatctggaagcaaactaatttgagtcattttgagagactcttccttaacttacatgcccacattatagtgactattaactgcagtaagttaggttatgctgcagtaacagatactcccaaatctcagtggctctcacagaaagcttgcattttcaccatgcagagtgtgttctgggtctaggccagagaacagggcaactgttctctatgcaacagctccacaatcccggtggaaggacattccaccatcttctacatcatcatctggaacaggaagtcttctcagtcaatgccaaagacgaagagagagaaagagggggttctcaagccagcaattaaatgcttttgaagtgacatttgtaacttctgctcacacccattggtcaaagcaagtcccctggccctgctgagccaagcaggctggagatgcagactttcccgcacctggacagagagacaagcaagccattcgtgagcactagtaatgtctcttacagggtctatggaatggttgctgttttttaaattcagaattgtttaaaatccaacttctttccttttctgacgttgaatcctgcagcaattattatctccatttggcggatgtggaaactggggtcaaaggtcaaataaatgatgtctgcaactgacaaaacaagattagacttttaaaaaattacctgcagtgtcactctgaaaacctctcctctctatagtctcccactcaggtgatgatacccacatccatagtaaggcacggaaacatgggttctagcctctgccctcatgccaatcaaccgaggacccctggaaaagtcactttacctttccaaggctcagtctacctgcctgcaaaatggcagtagaaactaccccatcctcctggtctccaagagttagctaaggatgagatgaaacactaggtatgaggtaaatgaaacttggataaaattcctgatgttgctattatctgtgagaggggaggaaatactcttgggtgcagtaatgaatgagctttactcaaaggagatcttcaaaagcttatttctggcgctcagaaattacccgcagaatttccagactgccatgtggagtgctttgacactcgactttcaactctagcctgtctttgtggccttaggcaagtcacttcacctctctgacctgcaggctattcatctgtatgacgggttgcctatcctcctggcaggggtgctgggagggcccgagccaaggctgaggggtcccctggaattcagaaggcactaagcaaaaactagttgcccttttcccgaggatcttgtaagagaaccttgccagagatttgggatccggaatttttttcccttcaaaggaatggcaataaggaaatgtgtgtgagcatgtgagagggagggtgcatatgagtgtgtgtgtgtgtgtttgtgtgtgtgtatgtgtgtgtgtgtagggggagaggactgtggagaaataaagaaatggtggggaataaacaacagaacattttagtgacttgcagatgaaagcttcttttagcagaattcattagctttctgcacaccagtttagctgtgtttggaaaaatacttaacttgctataggatgccaagtcatgaatgtgtcagagagagagagaaaatttttttttagaaattcgtctgtccctctcctaagagcaaagggtctattgaaacgcagtggttgatgcttgttggtgacattctctttatttattctttgtgtgagaatgtgggaaggaagtcaggagtgaaaggtttttgcatgttattctgagagatggagggagagggggcaaagaagaaagaataatgggtgggaaaaggagagaaaactgtgagggggaaaggaaaggacagagagggcttgaaaaggagcaatagtgaaagagatggaggcgaggagagacagagaaagaaggggagggaaagggagtgagtccggagggcagagctgagagctgggagacaggcaggggagaagacaaagaaagagaaggaaagaggagtcagaagagacaagcagacagacagacagcccactaggacagacgagagaagggccgggagatggggaggtggggcgggactgggagagcgggacccactgtcccctcccatcttgaacctgccttggtgtatgtcaaccttgacgcctctctcagggcctgcctacccaaccagctgcatctgcaatgtttaaagtgcccgtttctcacatggagcctgacgatggagccgagccagcctgcatttgacaaccagatgctgagctcacacaaaggcatcctccgccctggctgctggcggggagatgagcaggactttgcagagcaccagtccaccctccgtgcctgaaaacccagggcaggccctgccacagcttcagccaccaagaagggaccagggttttggaatcagacagagctgagtttgaatcatacacagcccatcccttcccggtggctctgtgcatgtggtcctgagccttggtttccccatctgtgagatggggctagtaagaaaatggatggtgagaggattcctaaggaaagaagcatcaagggtttggtaaagagaagaccatagattgcaaacccaagcctagcaggttgaattcaccggaagcggtttgttcgacctcctctaggcttcagtttttgaattaattgctgacatcaaaaacccagatttcttataaaaagtccatatttctggtttctcgtgaaagaccctagtaccgaaggctggaagtgagccgcaggccccctctctgccataggcccctccctccctgtggctccacgtctggttgccctcatttacatttccttcctggccgctgaagtcacttgaccctcatttagtggctaaataccaccttctccccaccagccacccaagttatgcccttttatatttcttctgtggttgacatggtctttcaaggagaaaggaaagcaaaaattgctaaggggtgagttgtcatctcattctcagaacaaagctggatttccagttcagaccccaatcgggcccatcaatacgaggggctggacccgcacaaaagacatgcggattgtctggggctgcaggtgggtttcccaagaaactctgaaattcaaatgagtggctgcttctctttgaaataatatgtttcaatttagtgtttaaataatgtagctttcattccagccattgttttggactttgcaagaattttcaagcatgtaggcagaaactaggcataagcatgtactcctccaccccaaaagatgaatcctgtagcttctcaaggattgggagacttgggcatatgtactcaggaggatacaaccggacaaagagctgggaagggcctgggctgagggaggaaggagcctctcattggttgagtacccattgtgtcctgcagccagggggatggccaccatgtatagcccccttgctcagagcttatagtacagaatgggaggacaacaagtagacacattccaagtttccaaagagaacagcacaagatactggggagacccagagaaacacctagtgcagctgggaggaaagcaatttagttccctggaagagatgaagccccagacaggccccaataatgagtaggagttggcatggagcagaggtgcagatgggagctccagggagcaggtgacaaagatccaggtatgtttggggtcctggaaagattgcagggttctggaatataatgtggaggagaggggagggggaagtgagagatgagctagggtctgtgaacagggttcgatggagaagggcattgcctgctgtgctgaggcatgcagagatgagatcatctgcaggcagtggggagccatggacaggtttttagaacaggaatggcacgatcagatttatgtgttagaaacatgattttgaaggctatgcggaagcagcctgcaggggtgagcctgaaggtaggaaggccaccaaggaaagcgatgcctggaggtggccaatgggatacagtgaaaacggtggattccagaaatcagtgttggcggaaaatccgataagacttggcgacagctgcagcatccctgaaggaggctgatttgcataaaagctgggtctctgcaaagttccacccctattgatgggtggttaattgaattcattcatctaacagcaaacatttatagatgctgactctgctgggagccctgagctaggtgctgagaggaagaatgaggaagagctgattcctgcacaccaagtggcaagccaccaagaaaccttgctttttaaaaggcttttctgacccagcatcctataaagcagatggtagccctccccgaccccctttccagctcccgagttctctggctgagagaatacgagttgctgccactgcacccaggcaagaagagccagaccttaccacagtttaccgtgagctgggcactgtgcccgggggcttgtcactgactagcttattctaggatggggttcagggttcagcaaactttctgtaaagggtcagagagtcaaaactttaggcttgaggtccatacggtctctgttacaactactcaattccaccattgtaatgtgaaagcagccatagacaaaacatacatgaattaacgtggctgcattccaataaaactttatttacagaaacaggtggtgggccaaatttggtccacaggccacactttgccagaccctgatggagttctcaggattctacttgtgctatagaaactgtgcatcaggcagggtccaggaacagatggctactcacgtggggaattgaggagggggtcactggagggctttcgacaagggtggcaggtgaagaggaattgacagggctgctgaagtcctcccaggagagcaacagtggggagctgttgcaaaccctaggattggagggacagcaggaggcgtgatcatcagaacccacaagacctgctgcatggagagagggagggccacccagcggaagctgtagccttcggtaatgagtcacagcctgtcaagagcggctgggaggaaagcactctgacctgctttccctcctgctatccagtctcctgctattgcccccctttgactggacccagcagaggctgggggcaagggagcccactgaggcaggtggagaagggtggactggcaagtggagggcaaagagaatcccagatccacagctgcgggagtctaaacaggcgcccaaagtcatgcagctagcgagcgacagtgctttgattttaagccacctttggtcagcaagttctccagtggccaggttctctctgggcagaggctgacatgggaggagatagaggatgtgccaaaggacaggcgggctgaaggaggggctcgccgtgggcagggatttttctcagacaaaaatagcccccagtgggaatccgacagtcctggttcaaatcccagctcagctacttactgctgtggtctggctcaggtcattatgcctctcagaacctcagcttccttatctgcaaagctgaggtgagattctctttatttgtacagtgtttctcaggggtggtcaagagacttccagtccagacctcctggagtgctggttaaaaaagcaaattctcagtctgtctcagactgtctgaatcagactccgtgggtgggatcagaaaatgtgtcttccgacaaggttctggggtgattcgaatgcaccccaatgcatgagagaccagtctattggcttcttgtgataatgaaatcaacctgtccacacagctgtaggcccgttgcagacccatcatctatgggcagcccctatgagctgcactgttgatctcaatcagttcatcaaatcatcgtggcaaccagagagatggagttactctcattcccatttcgtggatgagaaaagtgagactgggagagatccaaacacttgtctcagccagatggataaccactggctgggacacagtaagagccagttcacttcctcttgccctccccaggagaagagagggctaagcagggaggccacggcagaagcggagccctgtgcaaccatgggcaaggacccagaggaccccctggggcaaattcaagcgctgaaggggaaaggccatgttccccacaggaaactgcagagaggggccacccaggaaagcctggcaaactcgtctgagcctaggcggccccaggagagaggcacaacttctgctgagctgtgaagcctcagcgatgctatatgaaatcagccgggctgggtaattcacattaaggcaccggaagctgtctaacagaggcctttttctccttcttttaaattaagcaatgggatttgctcatggactttagggtcctaaatactcttgactcctatggtgagggggaaatgtatctttgtgagactgagacttctttcatgggcatctttgtgcagaggtacctagagatgtattttttaaagctaataaatcagaaaccttgtttgaatcccaatccagaacagatgtaatgcatatggtcagtagacttggagttgcaaataaatatgtttggaaaccaaatatttgaaaagcaattcttcttctcatttttttttttttaagtgtcactgccaagatcggttcagggatttggtttcccctgaagttgttgccacagcactatactctctcagccagaaaggagatatagtaatgccccaggctaggggtgcagagaggtttcaacttgcgtgcaagttggggttgattggttgtggctgcctgaagtgctaggcagagaaggaacctaggctcagctagaaagagtgctatgatccattagcaatgtctgccctaggactggtcgtaggcagtggaagtacataattgccatccctgtcctaagtgttttaggatttgctaaaccctgagctacctgcttttttaataggactgtgttttgtttattttgaatgtagtgcaatgaaaattttagggtacagaaaaatcggggatattgaagaggttcactcaccctctaaatgcaatgcccacataataactaaataggcctctcactaacccagccctctacctgaagatagaacaggtaatcctctgaacaggcctgggtcccagaggtggcacttatcacaaatacttaccttttgtttattttatttattgtttgtttgtttgtatactggattattgactgtttcctccctagaacatcagcttcatgaggacagggactttgtctatttctgttcattgctttgtaccccacatttagctagcagtgtatggcacattatatggactaaattgatctttgctgaataaaagtcttttttttccatttttttgttcattccctcacacgtgtgctttctgataccttcactactctgagctcagtccagggctgggtctgaaaattcagatataataaacctccagcctgctgagggagctagatatgtcatttagtgatcctagaacagcacgaaaaggtcacaataaaagtaggtgctgggaggccaggcatggtagctcaggcctgtaatcccagcactttgggaggcagagatgggcagatcacttgaggtcaggagtttgagaccagcctggccaacacgggggaaacccatctctactaaagatacaaaaaaaaattagctggccatggtggtaggtgccttggccatggtggtgggatgggttatccaagcttctaggcaggctggggcaggagaattgcttgaacctgggagacagaggttgtagtgagctgagattgcaccactgcactccaacctgggtgacagagtgagactccatctcccccaccaaaaaaaaaaaaagtaggtgctgaggcagaagtgacacatcagggagaaatgatgcattggagcaccaggagagaattcacagaggcttcctattgacctagggttttgaaaatgagtagacattttccaaggagagttggatgtattatgttttttacaagtatgtaggatcccatgctgacccaatctttggggacagcctttgagccctccctggtgtgattcagagaaagtcagacctcttgccccagtccagatgatcttcgttatgggcattctgcaaggaccttgttagcagaaaagcctcatcctcactggttctgtggtgagcaccgacccctccacccgctgccctagggatattgtcctcaatgcctccctgcctggctcagaggcacgtgcagcctgtttttacagctttttactgagctgagctgggagaaaatgccagcttgatccatttttctttcctgttcttcagacatgtgcaggcaaaaaagctggctcagcagattgcctgcctggaggattttggatggaaggcaagttcagagtctcatcatttaaaagacctgctctcttcgaaagtaatggtaacaataatcgtaataacagctaccgtgggtggctggcacgcttgctcagtgcacccctggaccgccactttacttgcactattttacagaagcttcaccaggaccttgtaaagttgctgttattttttctattttcccatgtgaaccttaagtccaagtttatacaggtagaagtcagaaagaaaaccgtagttctcggactcctgaactcacaccttgcctttccatttatctgtctgtttaaatttatttattgatactcttactcctttcaaaaaagatttgaggcaatgatggaaatacaagcagaaaaagaaaaaacaaattaaaccaaccaaggctatcagagccaagagactctgagacaggaaagttcagtattttctgcaacggttgagtaccgtattttttgtatatcaggtcagcccagtttgttaattgtgttattcaggtcctctctgtcttcactgattccatctgctattttctgtcagtcactgagaaatgtgtgttaaaagccccaccgtagttttggatttctctctctctcctttcagttctgtcagttttttctttttcttttttttttttttttttttgagacagaatacctctctgtcactcaagctggaatgcagtggcacgatgtcggttcactgaaacctccacctcccgggttcaagcaattctcttgcctcagcctcccagctacacaccactatgcctggctaattttttttgtatttttggtagagacgggggtttcaccatgttggccaggctggtctcgaactcctgacctcaggtgatctgcccacctctgcctcccaaagtgctgcgattacaggcatgagccaccacgccgggccagtttttgcttcatttttgaagttttgttgtgagacacatactcgtttagaattatgtgtctccagcggagtgatgctttttattatcatttatcatttttattatagtccctctttatttctgctttaaagttgcctttgccaataacgtagcctagttccatttgcagggaattttttttttcatcctttcactcactcaacctcacggggtcgttatatttaagatgtgtctctgacaagcagcatgtaattctatttttgtttttgtttttaatcctagctttgcaatcattaccttttaataggaatatttagtttattcacctttaatgtaagtgtccatatattgaattataggtgtatatgtacaatcacattatctgttttccatcggtctcatctgttttatgttcttctctcttgattttcttgtcttcttttcaattaatcatttatttgttatttaaattttaccctctattatgttggtagtttacattctcatactattcttttaggacttttcttaacaatgacaataagcatccttgtcttattgaagcctactagatgacagtactattaccgtttataaacagtaaaattaagacattttaattttgttattttaatttaatttactctctttcaatttaaatgttattgctgtcaaatattttttattctacatgtatttaaaatgccacaagatattatcacagttgacccttgaacgatgcaggggttcaggatgccaatcccctgtgcagctgaaaaatctgcatttaacttttgagtcccccgaagtttaactattaatggccaactgttgaccggaagttttaccgataacataaacagtcaattaacacttgctttgtctgttatatgtattataactgtattcttacaataaggtaagctaaagaaaggaaaatgtcattaagaaaatcataaggaagagaaaatatatttactatttattaagtagaagtgaatcatcataaggagaggcaggagaggcaggtacactcagtgtaaattttttttttttttttttttgagacggattctcactctgttctgtcacccaggctggagtacaatggtgcaatctcgactcactgcaagctccgcctcccgggttcacgccattctcctgcctcagcctcccgagtagctgggactacaggtgcccaccaccacgcccagctattttttttgtatttttagtagagacggggtttcaccgtgttagccaggatggtcttgatctcctgaccttgtgatccacccatctcggtctcccaaagtgctgggattacaggcatgagccaccacacccggctggtgtaattttattgaaaaaaatccatgcataagtggacctgtgcagttcaaacccatgttcaaagatccactatattgtcatgattttatgcagtcaaacttcatctagagttatctacatatctagcccttccattgcttgtcaattcttcctgcatttctgtgcatctttctgagatagtatttcttttagcacttctaaatgaagtttatgaggaagctccttttaattttggtgcaagtcatctgatagcaaattctctgttgttgtttgtctggaaatgtctttgaggccccatttttaaaggatattttcactggctataaactatgctggcaataatgttatcccagcactctcaatatgttattccattgtcttttggtttacatcatttcagtttcctgtcttagtttgtttctttgatgataaagtgtcattttcattctaactacttttaaaattctctttgtctttggccttcagcaattttactctcatgtgctaaggtgtgtttttcgtctgtatttattcagcttggagttcctagtgattcatgaatctgtagtttgacctttttaccaggtttttaaaaaatgtttagctattatcttcttaaaagtgacttctgtcttgttgtcttttttctacccttcttggactccaattgcatgtaagaaagatcttttcaccattttcatatgtattttatggctttttaaatttctattcttttaacctttatgcttcaatttgtatattttctatgaatccatctttcaggtcattaaacttttctttagctgtatctaatttgatattaaaatcactgcctgtattcttaatttcaattattatatttttaatgtctaatattttcatgtgattcttttttaaagattgatttctctagtgaaaatgttcaacttgtcatctattttcttgaatatattaatctcaatttttaaagtctatgtctgattattctaatactcagatcacctgtgggcctgtttgtattatatatattttttctcttggtatgcctgataattttttttttttttaagacagggcctcactctgtcactcaggctggagtgtagtggtgcaatctcagcttactgcaacctctgcttcccagtttcaagcgattcttgtgcctcagcctcccaagtagctgggattacaggcatgtgccaccacgcgcagctaatttttgtatttttcatagagatggggttttgtcatgttgtccaagctggtcttgaactcgtggcctcaagtgatccacctgccttggcctcccaaagttctgggattacaggcatgagccaccgtgcccggccaataactttttattgagtattgaaaacttttgtataaaaaattttagaagctccagatgatgttattttcctccaaagataggattttctttagcttctgacaggctgttataatagaagtgcatagaatcagctcaaacaggagctgaactgattcaataatgagttttaatctttgtaatgtctggcccatttccagctcacctttattcctagggtgtaggctgacatgagtcttacctgaaagccaattcgactatttcaggaaaaaatagaggcacgtattagagaagcagcatgactgtgggaatataggagtatatctgggaacttaggagccataagaaccagggagctgagcaccccaggactctctctcctcatttggaatgcctcttttcctctgatttctgactttaccttctcagaccgttgtggctcggaacatggtcaccagcagttaccaagagcacatttctaagatcctctaccacagaaggacaaagacctgatccctctctgtcaaaaatttcaagacagagcagtgatccggtcactttgtgtcaatcactatagccaagtaggaagaaccccagggaacacagatgactgagtcatagccacaaggctggtgtggagaaaggaacatttctcaaaagagtgaggaggatagatagagttgggtgcaaaactatagctatctagtgcagcagggcactgaggtttgatattccccagaaatgtgctgctgctcttaaaatgaatgaaagtgctccctttagttaatacgctgtgagtactgaagggtttccccaagctcctagcggacagaaacttcctgctgtatctcctgtgataataatcataataataatagcaaagacttggaaccaacccgaatgtccaacaatgatagactggattaagaaaatgtggcacatatacaccatggaaagctatgcagccataaaaaatgatgagttcatgtcctttgtagggacatggatgaaactggaaaccatcattctcagcaaactatcacaaggacaaaaaaccaaacaccacatgttctcactcataggtgggaattgaacaataagaacacatgaacacaggaaggggaacatcacacaccggggcctgttgtggggtgggggtggggggagggatagcattaggagatatacctaatgttgaaggatgagttaatgggtgcagcacaccaacatggcacatgcatatatatgtaacaaacctgcacgttgtgcaaatgtaccctaaaacttaaagtataataaaataataataataataataataataataataataataataataactgctatctactaagcagtccagtcctgggtcaggaagcctttacacatctctcataagaacatctcccatctgtctgcaaagcaggtataactatgcccattttcagaagagtagccagattataccctgaggcttacgaaattacgaataaaaatcaaaagtgaatattttagtgtacaaaaagaaatcacacatatttcatattttaaaaagctgacaggtaccacaaacatcatgaaagctataaaatttacataatatttttaattaaaatattgcctagcattcctctataatacttttatccctctatttttggccacatactctttgatcatcttttcatatgacaaagatgtgatattatttcctatggaaagaatagaaaggtaattcagtcttttctttagcatggttgaattttttttttttattgagagttgagatgcaaaaacaggcaaattcacacaaaaatatactagctgtttgtagttctgttattggtttgtgctctacaaacaaaaagttaataaatgatttttttacatggttcccattgaaagaagaaaaaaagaatggcgactttataatttcataggctgaattactgggcatgtttctgagaagaaagaacttctattttaattatatatctacagaaaccaaattgcctgcttacagttttacatgtctgatgattggaagtttttgtttgtttgtttgtttgtttgtttgtttccacagactagcctctgactccatatatttcaaactttgttcctcttccactacccacatatttctgatgtgagacattctagaaaaatttcatattgcaagacggcttctaggaataccctgtcttggacagtgggattattgaagggaaagcaggagtatttaagcagaagtgggagtgttactggaagccattcctaccctggaaagtcaactacacaggccgggcatggtggctcacgcctgtaatcccagcactttgggagactgaggtggctggatcacctgaggtcaggagtttgagaccagcctggccaacgacgtctctactaaaaatacaaaaattagctggacgtggtggcatgcacctgtagtcccagctactcgggaggctgaggcaggaggatcgcttgaacctgggaggtggaggttgcagtgagctgagatcgcgccactgcactccagcctggtgacagagtgagatatcgtcaaaaaaaaaaaaaaaaaaagaaagaaaagaaaaaggcaactacccagatatatttaactaaactcggatcagaggtagcccaactcatcttcaccttggcctgattccaaaaatgattatggcaaagtattaaagaggaaatcacgtggaaagggacagtagtcttgaccaattgggactaaaatatcttgcttttacaaattttgccaaaacatgtgaccaagtgaacacattgtccgccctcttcccgggctttggaggaaacctgcacaaagggaggggccctgagccctaagcttcgttagcttcatgatcaatacatcatttccacgttcagacgaggaaacaaagtctgagggagatgaagtcatttgctcaaggccatgcagctaataaatgatgaggccggtaagtggaaaacatggtctctgaaaaacagcagaggtcaagatgaatggattcccttctgtcagcctcctcacccctctgttgggccttggagcaataaagacacaagagatattaaggagttggcatgaggtctgactaagagcgagtgtccttgcagcaaccagaacccagtgtgcctgattccaccccaacaagcatcctctgtctaggtgttaacataaattagtggtctttgacggaatccaagggcttccctgggggatccaccagagccaatgtggagagtcaaagctctggaattcaagcccaagccttgtttatgatctttcctcctccctggggagactgtgctatctgctatctcttatgccagagcttctccttttcctgaagggaaggtccctgactcctggaaaggtggacaggtgcaggatgtaagaacctctccgtgtgaccttggtggatgattctggaattgctataataggaagtagaatattgaacaaagtaggacatgtatcctcttgcatacagaagatttgggctttcatctctttaaaagcaaaaatacagggaaatgttggagcaagtatggtcactttccttcctcaactcttcattgactctgtgtttgaaaattgggcctcatatatccatcccaccatgcctaaagggtgagcaagattccaggacagaatctccaagagcttcttactcagtgatcattggagacagacatgcaatgcaccgtgtagtgttaacacgcaggaggttaagtgcaagctctcaggccctttgatgtattaaacaccaaggactttaacgtaatagaactgtaaacctcaaatcagagctaatcacactaatttgctgaactccaaaaccaaaccaaaatgttcatttcttcttaaactaaaccacagatccaagttgttttgatctacaaatctatctaacaaaagatttgaggtggcttacaaaaaactacatgcaataaaacaaaactctaactagataaaaaccaggatcaggggaaaaaaatcaaaagaatcaaaaccagagggaatattacaacatagatatgcaagacctatgtagtaatttaagttgaatcgatgagttcctgagccccctggcagccaaagcaatatggaagacatattggttacatgacatacattattcataaagagaaataatttttaaacagtctttaactggtttaaaatgaagctaaatctcttcccatagtaggaaagaaagataacaaaatattctctgaatcacacttaaagtacttcatttgcttcaagatcctgtttaatacacataatggtttcaaacacatgaatttatttaccatttagtttccatttctattggctttcaaaccttgcttaaagatattaatataatttccataaacccagtgggtccagattttcctttttcgcatacttgcctgaaactatctcaagctcttgctgtattggttttgtacacgacctcattgttttagcaattaaaggataaaacttgcacgcgtgtctccagggagatgagaattcaagaggttaagtgtcggccttgcactgctgagtgtggttcctaatccccagagagctcccctaaactgtttggataaactgaggaaatgtcagggggagttctgacactgagcatgacattaatcttcgtaaccattcctccagatgtgcacaaatgttccaaggatgctgaatatccaagctcaccacagcagcccactcttctaggcagtgggggtggggagagtggggcggggggatcaggagggatggaggaggttgggggtggggcagccatttctgttctctttcctaagtattctcatggcttaaaaagatctgtgtgcttacacttgcagagatgaacattaacattatttcaagtgaccatgagaaaacgctcagtacctccgtttcatgtaacaatatttgcaagtcatacagctatagttatagctatagctctacctagattgggtgcatatatactcaagtgtcaataatattcataaatatttatttaaaataacacccaatctctctgggtggaggaaattttactattcatacttttccaagttttctacaactaacatacattgttttacaatgaccaaaaaatgaccaaaaaaaatagttttttcttttataccttaaatgtagtcattttagaatatccaaagggtctcacatctatttgtagcaggaaactctctgtacatccaagatgtatgtatcattttttttcctagtgaccctatgaggctgtggctaatatttacgtggcgatatacacactacaggccaggcatcctttaaaggtttttaaacagccccacccttaagagacattggaactggttctcagattgtacacttgctcttattgcttctggggggctcagatcagtttgcaaatactgttgaatttaaaaaggagttttagtacccactgtgtaatttgtcctcaccccatctgtcgactgcagaaacaaattagcttctctccacatggtctgccgctcccctgttccttccccaccccccatccccagctgcagtccctttccaagaatccaagacttgggaagaaaagctgagtgcaaaaaagaacttttcttgccaagacaataagcagtgcgggcagcatatgtctgcacgtacatgtgtgtgcatggtgcacatgcgtaagtgtgtttacaagtgtctgtgtgtatggacacttctgcaggtaaccagtgcacagtcctccagctcaaggcatcagatgaggtcacatttctgctaagagccaaattatagcatctcctgcttactgtaaaaaagtcatttctccccagtggcccttctgtgatgatcaagttgtccagggcctacttggaccaggacataaggcctggttactatcttctggaagagaaaactgggaagtctgatggtgtccttggctgcagccacatgacgtttctggataaaacagggagcttaccactcagaagcaaggtttctctcaccccatgtggggtgcggcagagaaacaggcggtgtgtggggttttgtctgctacagtggtgacttcagcagcttagaccccttgagtcagcatttctcagtgtagaatgggacaggaagtcccgtggttctagtggtgtgctcaataggcctctgtgccaaaggaggcgatgccaggtgctggacccacaaggctgggttcagcattggcacactggcggcctcacctacccacagtgttgagcttgggttcctgagccagacctcctttccggctggacagggtgagggagcgtttggtcaagtgctgtccgtcatcagaggccttctcacaactttgaacctcaaagatgagtgttggggtctcagtcccattccttccagaagtcctctgggcctgtatgcagatagcctcaccttcctcccagtaaccatcaagccccatgaagtaggaaggagtagcaggggaaatggagtccactaaaaggccgaagccctcggctctgatgaaaacaaatacctacccgcttctaaattcgaacccagacagtgaatgtctgcttgtctgatgcccacataattagaaaaacaattcaagtgcttttggcttaaacacaaaagaccttttatgctaggaacagaactggatgacacttttaaaaatgacagtttttgcttttaaaaaataataaaatagaacaataaaaataaaccctgcatcagtaataaccccagtacatgtgtatgtgaatatatgcctataataatacttatcacttaacgagtgctatatatgtagcaggcactgagccaagcactccacaggcaacacattcttttattctccaaacaacccagtgagttaaaaaaaatttaaaactattcttagccctacacagcaaatgatgaaacagaggcgtaaagaggttaaaataatctgtccaaggttgcccagcccaaaagttgtattaaaggcaacaggcaaatccaggttatctgcttatctgacttcaaagtcttcattgtgtgcatgattttttaaaccgatgaacttcaattaataatgtttactttttagaatagttttagatttatggataaatggtacatagtacagagagttcttgtctatcacctcttctcccgccaacacctgcgcagcctccccttttaacatcacacattaatgctgttcatttgttacaattagtaaaccaatgttgacactatatgattgactaaagctcatagtttatattattaactaaagctcatagtttactcagacttccttagtttttacctaacgttctctttctgttccaggaccctatgcaggtcatcatatcgcatttcatcatcaacatttcgtcgttatgtctcctcaggttcctcttggctgtgatagtttcccccagactttctttacttctgatgaccttgacagtttggtaagttctggtcaggcactttgtaggatgcccctctattggtatttgcctgatatttttctggtaatttgactggggtttttgagaaaaagatcacagaggtaaagtgccactttcatcacgtcttattaagagtacatgctgtcagtgtgattggtgatgctgatattgaccttggtcacctgactgaagcagtgctttggtgtaattttgagacccaggccgaagtaacttagtggggggcagagtgtgttggtctttgctcaggatcctacaaagccttccagtcagcttcatggtggttccctaagcagcatccacccctacaccacgggccaccaacaccactccctccacagggctccaagcagcaggaccaggtccactgtctccataactgggattaaggaggatcttccctgtctgaccctcgagtcccctctcatgattctctttttttcccttaattaccacagacattccaggctagacattcaggttaagaaggcagtgatgaggtcttccactgttctttattccagaacctaaggactgtcactgaactccaggcaggttgcctgggctggggcctagaactgctttacctccatatggccacttttattattttgtgctaattaaaacatctgatgggcaggtacaggcatctctggtggtgactacaacctagaaatgtgaagacactttcacctaatatgcgtaccaggttggaaagatgaagtcctgaaaccaggtggtgcttggctttgagaaggtgggctctgtttctcaggaatcatacactggcagcccaagggtcctcagatcaaatccagcccataggtaggttgttacttttttttttttttttttttgagacagagtctctctttgtactctaggtgggagtgcagtgacgggatctcggctcactgcaacctccaccttctgcgttcaagtgattctcctgtctcagcctcccaagtggctgggaccacaggtgcacaccaccatgcctggctaatttttgtatttttagtagagacggggtttcaccatattggtcaggctggtctcgaactcctgacctcaggtgatccacccaccttggcatcccaagatgctgggattacaagtgggagccaccacacccagcctatcctttttttttttttaattaatagatttgattttttggagcagttttaggttcacagcaaaatggagaggcaggtacagagattttccttattccgctgccccaacacacgcatatcctcccccgttatcaatgtccccactagagggtacattagttacaactgatgaatctaccctgacactgatgtatcacccagagaccatagattacattaaggctcactcttggtgttggacattgtatgggtctggacagatatacagtgacatgtattccctattacactatcatgtggaggcatttcacttccctaaaggtcctttgtgctccacatattcatccctccttccctccctttaattcctggcagccagtaatctttttaccgtctccagagttttgccttttcctgaatgtcattcccttggaatcataccgtatgtagccttttcaaattggcttctttcacttagtaatatgcatttaagtttcctccctatcttttcatggcttgatagctcttttttttttttttagcactgaataatatttcattgtctggatgtaccacagtttatgtatccactcacctattgaagggcatctggttgcttctacgttttggcagttatgaacaaagctgctgtaaacatgcaggcttttgtgaggacgttagtttggatctgctttgagtaaataccaaggagtgcaattgttggatcgtatggtaagagtatgtttggtttgtaagaagctgacaaactgtcttccaaaggggctgtaccattttgcatttccaccagccatgaatgagacttcctgctgccgcacatcctcgccaacatttgttgttgtcagtgttttggattttagccattcgcataggcagttagtggtatctcattgttgtttaacttgcaattccctaatgacatatgatgtggaacatcttttcgtatgcttatttgccatctgtatattttctctggtgaggtatctgttcggatctttccccattttttaattggttgttcattttcttattgttgagttgtatgagttctctgtatagtttggattaataatctgatatctttatcagatatatcttttgcaaatatttcctcctagtctgtagtttttccattctcttgatgttactaatttttaaagttttgaattcgttgccaatatttaaaagttagaaaatttcctatgaaaatctgatttctaacttttccttaaaacctcaaagatctgacaacacgggctgcaccttcctgcatggcagcacttggctggaagggtcatggctacagcctgtataaggtgcatgctctctgctgtgcctctttccctactgcttcaagtcattgagctcagtgtcacttcccttgcttggcctttccttacactgggccctcttaattcatttatgtcactgtcaggcttctggaagcatttgaatttgagtgttatgtcttcttgtttcagatgtcaagtatattcattgtcacaaacacaaaatccttgagagggaaaataagtcaacttgcttattcagcatttaccaggctccaggcacctaatatgttggatatattcaattcccacatcgcccttcacaaaggaggcattattacttccgttctatacccgaggaaacaggctcagagaggggaagtcatatcttcaaggtcacacacctaggaagtggtggaacaaggatttatatccaattccgactcccaaacccctgttgattcctctaagccaagtggtttccctggaaggcaggcaacctggattttcccaatggaagagctttgacccaaaatcagggtgccccctgccagccagtgctttctgtggcttggttgctcatcaccatcttctggaaaccatcacctgggcttcaccctccacccagggctccgataagagttgtcatattagtacaatgtgacccgacctcttgaacctgctctttggcatacaatgagcaagtgacccacaccaggccaattccaattgttccccatggatctgacatttggaactgaactggtagttgctggaactactgagcctggttgttgttggaggtgaatcccataaagggcgatgctataaggaaaaggttctgtgaaccccaagcatggaagacctgtggccactggggtccttcttttctgtgactcattgttctgtgcgtctttgaattctatgagagctcttgaatacccttcccaacaacaattatttttagaaaatctacttacaaccaaaatcatgtaactcattcacctcaccatcaaatcatctatgaatcaggctcttagatataggaatcaagatgaaacaggccaaggacactaaaaggatgacctagaaacaggcttattgtcacccactctgttatgttattggagcagcaccttctcttctgttttcagcttccctggggattttctatttagactgataagggggtgaagttgggaatcctgagccctaatattgacagtggccatgatcttattgtgacaagggaaaaaaggccagccctaagaagaagaggcaaagatatgatatatagagaaagactctttgcagtgcttgaggccgtccctgtgtttgatgataggtgctcatcagttccccctttgcctgaacctacgttttctcacttggccccatgagccttctaatgaatacagacacttctggcaaggttgctcctgactgtgggctatttctgcctttcttttttcttttccttttttttttttttttttttttgagacagggtctctgtctcccaggctggagtacagtggcacaatcacctcccaaggctcaggagatcctccagcctcagccccgtgaagtagctgggaccacatgcatgtgccaccatgcccagctaatctttgcatttttagtagagacggggtttcaccatgttgcctaggctggtcttgaactcctgagctcaagcaatccgttcacctcagcctcccaaagtgctgggattataggcatgagccaccgtgcccagccaagtgcagtctatttcttacaactacaggacttggcacacagtggacacttaataaaggtttgttgagtgactggatcaatgagcagaatacagttggcaacttcctgctcctggtgattggcaccactggactgactggggttaggaagactggtgaagaatgggcagagaagaccaaggacttcagacaacttcctcatcccagactcctctgaagttagacgaggcccccacagtcccacccatcatggtcacagtgagcaccagcagagacagctgctgcgggatgctaccgtggtcattcctgggggtgggtcatggttggacttgcctttgtatcacacctcttggccagaacctggcacagtgcctggcacatagtaggtgctcaatagagagtaatgagggcaagaaccagtgagtgatcatccatggaattagcacctctgtgtgccaagcatagccgtgcctatgaaggagggagaagatcccatgtttacccttcagttgaggagagaaaattaataacccagtaactgtaaactaataatgaaggattaaagtgcagtggctaatggcacaatcagacgctgatccattgcttcaacagatatccttagagaacctactttgttctaggtctgatgttggacactggggattcagatatgagtaagatacagtcggggtaactgaggtctgagggggagtgtcacaaaaaattcactccttcagaaatatccactgaattcgtactatgtgtcaggcgtgatgccaggggctggcacgacgtggtgccccacagaggcagggagctgggtctcctgctgaggctacgccatcctttatagtctcagggacgtctttccctgtccaggcctccgtttgtagacctgtcaagtcaagtgacaagatcaaatggccaatgggctctttcacttctgacagctaaggctaaccctgtaggtaaagtccagctgaaaccgaatcccgccactctttaatttcctcatctgtgaaatggccttgtcacaaacagcacctacttcacagggtgcttgtgatgattaaatgaaagaatagatgtaaattactaagtatgtgcctggcatcctctcaatgctgtctgttcaacaagctcctcattcttgctactgtgattctatctgacacctgccgcgtgcccttccttgtgccagacactaagcctggctctgtggaaagagcataaaagaccctccagggtacaccctccaggagtgctgcatggagtgggttgaaggagggaattcacccagggtggtagggtgggcctggaagcctctgagctgagccgctcaggagagaggaggaggggtcactggggttgggggacaggattggggatcagaggaagcctcccagcgggggaggggcagggcctgcgcccttcccctccgggagcccccggtggctagatctggtctgggcgcaacccctgactgaggctgcgctgggagtgccgaaaggtggccttgtgggtaagtccttccagctgcatccaggtaatcccggccttcgagcgggagagatgataccccccgagggccgggcctggtccggctcaggatgcgtgccctgtgaaaatgctcagcagccctcgcctttaggagtgctcaggtccagcatgaatcattcctttttgaacttgtctaaatgtgtttataaaataaagctgcggcccagggctgctcctggcggagcgggaaggtaatatgtttttaattggagagattgggggaaggaggcagcgggccagggtgagctcaccccgcatgaatgcggctgggcggagaacaatgtacgttcacattctttgactacaacgggcctccgcaggacctggctcggtgggcaattctccggcctcggggcgggcgtccgggcccgcgccgtctgaggttagcgggagcgcgtaccctgggaggtggccagaagccctacattgaaatatcacagtgggtcagagcaggggtcgcaaactccagtgcacccaggaaccgcgcagtatctcaaacccacggacacccagtgtagacctggagaactggaaatgcgtggcctctgcaaaggggacaggcaccagtggactccaccagccccgtcaccagattgaatgtttctcaagaaaaaccagaaatcatatctggatgtaaaagctcctctttttaaacgttgtctttatttaattttatcctattttcttacttatttttggttatgtgggccaaataaaacagatgcctaggccgtatttagccctgcagctgtcccctcttttagatcttgggagtggacctcatgctgtcttttaccagctaccaggactttaggcaagttacttcacttctctgagctttggtctcttcaactagaaatctgatagattaatgctacttttcctgacttttcaaatgctttctatgttgaggataaagagaggaaagaagataattgtaatattcattgggcatctgctatgtgccgcgcatggtgttaagcaatttacgtattttgttgttgtgatgttttgttttgttttttaatcatcattattctgtaatctaggtattattcccattttgcagattaagaaatacaatcttaaaaagctgaagctggaatgtgaaccagtatttccaactttaagctgaaatcatctgaatttaaagaacacatcgtggtaagaatggggaaatggagtcaagagttaactggctgacttaatgtcacaaagccatgcccagtgaaggcagtagccattttgggtcctagctcaggaatgattcaagtagcaatagcgttttgcaaagtaaaacaggcagagctctcaaggttaaatcaagggtataatggagtaggtacccccctgcactgctccagttacagcccttccaaaggacgacgtagcagtatgtgttaaaagattcatattctctaaaagattcatccactttcacccagtaattcctcctgaaggaatcaatcctagagaaataaaagagctgtgggcaagcatttgtaaaaaaaactaatgctcagaaaatcgaacattcattataaaggaagagttaaataaggtaggtaatgtccatacccaggaatattatgtagccttgaaagaatgtgcaataacgggaggaaatgctcatgacataatgttaaggaaaaaaagtagaatgcaaaattaggtaaacatgtgtatgataatcaaagaaatgtaaagaaagaagatgggaaggaaattcaccccaatgttaattctctacgtggtggaattttaatttaattttcttcatccttgttgaaatttttttagattttctctaatgagcatattacattttacaatctgaaatatatatattttcaggatgttacaggcctcatctcatccagtttgggaagtggatgggtctcaagccaagtatcacatttatttaaaaaacaaaagcccagagagaaactctagagagaaaaataccacagtgtaaactggttattactggatgattggattatgggtgattttttcctacttctttatatttctatgtgtttttcaaactttctacatcaagatttctttgaaattggcaaacaaacagacaaatcataaaatactctcttgcatttccaactgttccaggcagggagatattcttggcagtagagctataccagaatccaggtttttctcacacattgctctatcctcactctggtctttgtacttgtacccacccccacccccgccacccagctaccatgatgatagatgctgaagggtttaatatacttaaattggtttaaagctaaggaactgtgaaattagggttcttttgtagtttatggaggaatggcttggcccagactattcttgcaacctgtttttgaccactttgccaagctaaaagtacctattgcttatcctattaattgagccaaggccgtgtaatcagggccttgctggcctagaaggcacatttatttcccggacatggcactatgatctgagccgcgtggtcacttcctatacccaacctttcacggagctggtcactcttctggcttggaaaaccataaggtctccaagtgaccttactaagagtcaagatacctgggtccttgtggggtttaccacctgatggtgcttcactcctgaccaagtcatcatgttacatgtacccccgcctttatttcctgagacccctccctcccaggctgtgtagcccagagaccgggaactgaatcctctgtgaacctgagctcacttctgcacttccctcagccttcattcttccctcacctatagaaggggagtagaacaccaacatgggcctttgggtacaaaatagattgtcttccttcttccctctctagcatcctctttccttcctaatttaggagctttttctagtctgcttctaaatatgcaccttggccaatctcggcacgtcaccaaatcctcgtggtgggctttcctcatagtaccaatgtgggaagtgcctaacagaatgcagagatggctcttaaccgggtcaggtgcctggcgtgcctgggttctgttttaggtgatcctcaccatggctcgttctgcaaagcaggggtcagtcagtagtcccattttacaggacactgaggtgcaaagaggcactgtaccatgccagcaggtctctcggtggggagtcagtgtttactcacattttcccacctcctttctgctcagtcttttctttttcccttcactgggtagtcttccaagttcacagaaatgaaaatcttcctaaaacaggaaggcaaataaatgagaatcccccttctgacccaaatcactagcaatcacccatgtatttagattcacatgagctcctgactctggaacctggagctaattcccctaaaagtcagttcatgtaaacttcttgtttaccaaggtgacaatggtaattaccaaggtgacaaggggaaaagactagaatgtttatacgactgttgacgagatctgtttaaatctagaagcatcagaaaatatcacaatgggatggtgtcaacctcttttgggagtttctggaccctcttcagtatctttttctactttgggggctcttgaacatttcaaagttgctttaaaaaaagtgaattcatctaatgtcattctaccttaatttcaagaaaacaagcatggtttaagttaatagctagaaggcaaggtcatgaataagcaaagaaagtgaggtgcgcaaagaaaaaaaataataatcaccccagtgtgtgaccttgagcaagtcacttaagccttagttttccttctctgtaaaataggggtaatgatttctatcccatgaggatgtctgatggctaatttcagtgacacaatttgtgcaaaacaaagagaactctactacatggtaaatgttctattctgcacaacaacaataataatctcttcaattgggggaaaatgatcacagccttatactttttgtcacttataatatctttgcttctttggggcctggagaagaaaaagcagctcaggatggggtagaagggggtgtaaatgacttcttgcaacttataaacctgcagttagacccttccatgccatactatgcactgaaatgcattccaggtgcactaaagaactgaatgttttaaaaaatcaaaccacagaggggaaaagacatgaatatttatcagacctctgggaaggtctggttaaatctacaagcatcagaaaagatcacaaaggaagagatggacagaattggcagcaggaatattcagcacatctgtacatagaaaagacaggaaaatgcatgcagcaaaaatgacaggcaaaggcatcatatctttattagataaagagcttttactatctgtatgtatatatgtatgtgaagccataagaaagttattcagaccctactagataaatgaataaggaattcaagtagataattcacaaaggaagaatatatttgggggagaaaatgagagaaggcaatctcattagcaaccaaagaaataagttaccacttttctaccatcaaatagcactgactttttaaataataatgttagctgttaaagaaggcgaagtgaaacaggcatatgcatacatggtagtagaaaggtaaattggtttgacccttttggaaaaaaaagtcataacatcaagtgttatgaaaaaaagttgtctagtatatggtttggggaaaactagagaaaactaaaactagatccctatgttaaagtatgtacaaaggtggactccaaggggactaaacatctaaacatgaaaggtaaaagtaaaaagtcaattgcagaaaacgataggagatattctccctctgacacatatgagctgtgtcaccttgggcaggacgtttcacctatctgagcctcggctttctcatcttaaaatgggaattttaacacctaccttacaagataatgtctataaagcgcctggcacctgctttgacagagagggctttcctcctgggtgcacagctgggtcagccttcctggcctctcctgtgttggtatggcgatgtgagtgagtactctggccactggagagtggggacaagtgatgggtgtacttccaggggtcaccctgcaaggcctcccatgcgtaattccatatcctcttctccatctattggttgattagagaggatttaggactatggaagagggaggaacaacaagatggaaggagcctgggtcactgaatccctacttggaagtctgcttggccaagaaaccctgattagactatgtgataagatacaaacttctgttgggtgaagccactgatttggagattgtctattacaacagctaacaatacctaccctaagtaacagtgcccagtaattattctgcaatttgaccaacaaattcccgtattgggaatctaatcattggggttcattaaatgtagtttctgatgaagcccttggtgggtggcagtgggatttcttaatccagtcactaatcaaaactgcacactgcaacatttccagagaagtggctaatagaaaaatagattctgttagttgatttcaggtttctttctaaattgttaatgttgggttttgcacactctgagattgggattgactagaatgctttgactagactagacaagcactcaagaaattttcaaaggataaaccaaaccaaaacaaaagtaggaaaggggaaatatggaagtaatcaggttgtctgtatcagctgataatagtctgtccctgggcacacagccagaaaatttgaaccctggccagcaactcacacactccaggtgatctgccaaaacagagggctgtgatgactggcctaggagcagggagcctgcagctcacaggggtactgagatgcaaataactgctctggccatgcaaaggaatatttagggcagtatttacatagtgcaaaacttctgaagaaacgaaatgtctgtggcagatgctgctggttctctacccaacagccatttccccttcttccttagaaaacgtatcccaatttcattctggcctcaaaggttgactcgtgattgttctaagctagtctttgtctttccattcccccttgtcagtcattggtctaggactgaatgtgtgatctacttctggccaccaagatgttagggaagatttgctagggccttttgggagagataaaagacagagggagatggaaagtggcctttcctcccacaaccccctttccttttcactttggactttgtggatgaagatgtgattcctggagctgctgcaaccatcttgtcaccatgagggtaaggccaaagagactcatagagacaccaatccaaacttactaagcctctgagccaacctgggagtttgttatatgaaataattatgcctgtactatttgctttttttcaggggttttgctgtaggtttatccagtagtgctgtcagggttaagttgatagaagaatctttgatgaaacttgactgattttcctggagttacctagacatggttcctgactctcacctggagatgtctaaaggcaaaagcctggttagtttgcctgtgaggactaatgaaagagtgggtgctgctgtgggagtaacttgcccatccagagtttcgtggggcaaagaaacgttgacttttcccatgggctaagtgaacgccatgagactagctaggctagagccttctggaaaggacctctcctaaaagaaaggccttccagggcaaaaggaccccagcaggaggtctctgtggggtgcatatcacaaaagcgtaggagctggggacattgtatgttgccagccagggactgtctcttaagagaaaaaatgggagtttcaaggtccccatcaggaggtccctgaagaagctataaaagagagatgcagcatttgctcaatggctgaccagagtatggagaaccaatcctctattgcccaacaccaaagtaggctggaacatgtgcttagcggacttcagacattacagggcattcggcctgtggggctctttactgcttctcccgttgcaacccagcgctgaaggagccacaacaaacatagggagtggaggaggtatggaggggcaagggccatggggtcatgaaagaacagacatgctcacgtgatatctaccattgtctcttggctccatacctaccttctagcgttcgccctgcaaaatggggtctgggagtctataagctaaaattcttagcattaaaagatgctttctgagttgacttcctttcagattctgtcaataagaggccctagtacgagatcagaaggtaggaggaggggacagaggagtgaacaaaccattgtttgttctctctctatctctctctttccttcttctggcagtgtctctgcaggtggttgcatctcttccaagcccctagcttctgagcaccagctcctccccagtggccccagctctgaagatgacaaaaattcttccaagcttgtagaatttaataacaacaccttctctctccccactccatggccctaggggtggcagctgcttcctgcagttattgatctctgttgctgtgccttccccctttttgctcctccatcttctaacacccatttaatcaatttcctgtattcagccccctttgttggaaatacctggcatgatttctgtcttcctcattgaactctgattgatacatctctcttcttaagggctgatctgaagaattttcaggtgaggctagactgaggagaggaaagaacttttcaattggatgagaaaatcagttttaatattagatgtggctgagtttttaatagctgataatgatatgttctaatgcctgaaagcgattgggaaacccaagatatcatctagaggcaggggagggagatggaacagagcaggtttaaatggaaatagtgacaaagaataaagccatttccttccctgtgaggtctgactgtatcagaaaccagtcacaccatgaaataagataaaaaagcattacaatagggattgcaacctggaaactcccaccaaatgtaatcaacagacttgtttgtgtagttcaaacagtgtttttctattcaaggtttctcaaagtcgcattattgacattttgagccagatactgggaggagggggctgtcttgtacattatattgacattttgggccacatgtttttctcatacaggatgtttagcagcatctctggcctctagaagccaggagtgccctccagacatgacaataaaaaagtatctagatattgccacatgtcccttggggtgcaaaatctcccttgattgagaaatattgctctaattggaaattttgcattaaaaattagatttccagtcagccttccttgaaaaatctacagacttgtaaacaatggacctatgtttctacctggctacaatcagctattgttaattccatctgtttctgttatatgctatattggttatctattgctgcatagcaaattaccccaaaactgagtggcttagaacaacgtttattatctcacagttactgcaggtcaagaatctgggtattgcttaacaggattctctggctcaacatctctacaaggtggtaatcaaggtgttggccaaggcttcagtcatctaaaggattcgctggggaagagtcagcttccaagctcactgatgtggtgttggcaggattcagttcctcatgggcaccagacggagagtctcagcaaatcactagctggtgactgcagccaccgcagttctttatcacgtggttctctccatagggcagttcacagtgtggtaacttgcttcatcagagcaagccaggaagaagacccagagacagacagagagagagagagagagagagagagagagaggaggcctctgaaagagagagagaagagagagaggcaaagagagaatgagaactccagaagtcactgtcttttatagcctaatcttgaaagtgacattcatcactttcactacattttcttccccagcagtgctcagtgggaggggattatacacggccatggataccaagatgtgggggccactggaagccattctagaagctactgtattagtttcttagtgctaccatagctaattactgtaaacagagtggcctggaacaacaaaaatctattctctcacagttctggaagcgggaagtcttaagtcaaaggatcgacagggccatgccctctctgaagactctagggaaggatcccctcttactccttccagcttctggtggttgccctcgatccttggcgctccttggcttgttgatgcgtcacttcaatctctgcccccgtggtcactggcattttccctgcgtgtctgggtccaaatttctctcatcttataaggacacctgtcattgaatcagggcccatcctaattcagtattacttcatcttaattttattaccctgtttccaaatcagatcacattcacaggtaccaggggttaagccttcaacatattttggggagcaggcacaattcaactacaataccttttctgtcacagatggagcatgtgcatctctgttgaagcatgctgctgtgctgtgggacaattttgtctgcccactccgcaatgatgccctatgaatcaagatccctgtatcattgcaggggctccttgagggaggatcattcctctacctcagtgcaaagtttgacaaaaggtgctctgtgctttggccctgggctccagcccttccatttgtactcatggggtcagctcttctgccctgtgctttcctctgtcatagcttttattagtctgatttcatgctagtttcttgctagtctctttgactgttaaatccttgaagtcagggatctcacctgattcatttctgagctctcagtgccatttctgagctcccagtgcccacacatggccggccatctcgtggatgagttgatggatccatttgactagtagataaatgcatacatggagagccaacatacatagtatgcaaagtcatgaaaaacaaggaatgactgaggaactggcacagataggaggagactaaggaggtttaacaactaaatccaacatggtgccctggagtgcattctgaaacagaggatattagggaaaagctgatgaaattcaggcaaagtctgtgagtagtttagtcaatggtatcatatgagttttcttagtttagacaaatgttatggaagatgttaaagttagggaaattgggtaaagggtatatgggaactcttagtactatcttaataatgcttttggaaatctgaaattatttcaaaataaaaaatctaagtaaatcagagttagggaaaggcagaagctagggtcatcaaggggatttactaagctgatgaataagttcgaatttaaaacaggagaaactgggagcaggaaccacagagaacaagtgcctaatcagggcccagtggaaggaatgagccagttttgtccaatttggcaaactctcttggctcctcatctgtaaagtgggtgaaaacccagatgttggatggggctttgacagcacttcaggtctaactagggtggcctgaaacccccaatcccatggactggaacagacaagaacttccaagacttctgcacatttgcagaggtttgaggtcccatcattagccatgcttcttggttcctgcactatgagtatacgtatgtgggctgatggcctcattcactggatacacacacacacacacacacacacacacacacacacacacacacctcaccagggacttgggagtatctaaatgtttgagaatcatagagcagggagacatccaacacagcacagccttccattcactgtctggctcctctcccctttacctcttccctcctgggttatgtctggggactccacatcttctgtctctattgtgtgggggcaacctagctctcctcctggaagccctgactcccagggccctcaggatcactgcccccaccctcccctacctcaattaagttcacagtaaaacacaattcctttcctagaaggaatctggacaccagctattaaaatgccatttactatagctccttacacagatgtgaagcctgtgctgtctccttttgagctcattacagccgtggctttgatccagtgtctagacaaacttgtggatcagaagcagttgggaaaagcctggcaatgtaattataggcttacaacaaagcactgatagttcaaatgatttgggttaaaattatataacttagagcatatccaaggttagcctcatgacaatgtcatccctcctcatttgcattctaatatgttctcttaagtggcatggaaattgtgaaactacagctagccagtggaattgtggagaataccaggtacgacaacctcattatgtgtgtaccaacagaaaataggttgagaactgcctcatcagaggaccaagtgagatctttacaagctataaaatgcttaagcgaaattaccaactaaagttcatatttgacttggaagagccttaaaagtgagctagtccagccctggctcctggcatattacagatggcggcactgaggcccacaggagggaagtggcctgcccatagttataccttgagccaatgatagtccaggcctggatcccaggcctgccccccaacacattgaagcctctattcatacctggagatgttcagacgaaaatagaatggccatagggtgagatcagcagctgggaatgtggccctttgtttttctcctgaatttctaagaacaacggcaggtgaacattatttttagtcactgagagacagtgttgagctgtaacacttttgctctcacttctcactggagtgtgtcttgtttgacaattttagggctaattaggaccaaacgcaaggagtcagccaagttccacagagggaaggatgtcgccagttgggaagggttggaatcctggctctgtgatgcctttattgcctgaccttggtcaggtaggttaattgaagcaggccttgctttcctctgctgtaaaacagtggcagccgaagctctctcaaaggttgatgtgaagaataagtgtccctggtgcataggaggtgcttctggaggactctctactatctgccccagcccagagcttgcaactttgctgcttaaaagaaggagcattacggtaccttactcctctgtttccacaggtgaatgggctttgctgtccccctctccttccaaagacctcttctgtaagagatgaaaacactgcaggacttctgtgtcagggcgtttccagagtggggaggaagagcacatgaatgaactggaagttttcttctttgagaaacagatgcccagtttgaaccatcatattcatctcttcaaggacagcccctttgccctgagttccacattttaacattgtgctttgcgatccattgagagttaattggcaccttcaataatagtgcatcttacaatcgatggcatgttagacgctatgaaacatggtacctcaagcagctcagcaaattcattagctcatggaaccacagaaaggagcaggggccacagcacccaagaactgggagtccgttttttctcccagtctccttctctgtcttcctcctctcaccctccctagcccacttcccacttctctcttctctacaccctctttccctctcactgtgttatctgtgtgttatcttggcttcatcccatcgggtcagctcaccccacgaagctggatgcgtggcccatgcaactccagcctgtgtgtggtctcacagcgctgagacaagagaggaaaagacagctctttccgccaactccagtaagaaaaaatctcagcaaagggacctgagtgggtcatgtgcccatccctggaccaatcactactgagcctcagccccaccccgcccagccccacccctgtggctggctgggaaggtggtaccctgagggcccacctctgcatgcccactgggggcactctcccaagtgctgggtccacatgttctgtggctccaggagctcgtggtaccttcccttgacttttgttcctccccaaatcaaagtaagtcaatcacttccactttaaaactcagtaactatcatcactatcattattgttatttatcactatggccccaatttggactctacgtttactgaggacaagcacattttccttcatttcttttgagatggaggtctcttaatgcaatgagcagtcactaaattactctagaaatgactaatagctaatgtttattaagcacttgccgtgtgttaggcacagttctaagtatattgcatgcattaggtcatttaatcctgaaaactcccaatgaggtagaagctgtttttatctccgttttataagtgaggcaactgaggcatgaggaatttgtgtaacttgcagagtaagtgagagttccaaggcaggcagtgagaccacgtcgggcacaccctcagccaccacagtgtcctggagggagggccgagtgtgtccatcctggagtccaaggccctgctgcctccagatgaccagctcagtgccagggcagcagggagttgaaatccctcatggattttattttaatccttaaaaataatagttcccatttgttggcactggtctaaaagcttaaattacatgatctcatttttcttctaaaaagctcattttgaatatgaggaaagagaggttcagggaaggtaggtatcttgcctagagacacacagctaggaagttggggagccaaggtcataactcaggactgcctgactccgacgcctgagctcctaacaatgcacttctccccagagcaaagaaccccagctctgagtctggagtgagggcatgggggctggtcatggggagaaaacttgggagggtggattttccttctctgctcacacacccatgcccactccctccctgagaactgccatggcctcaggggcagggctgagaggagctgcccacttcctcccacactcctaaactcctcccagccctgagtctccaagtatctgggaacaacgctgctaccacttcgggtaactgtggctatgcttgtgtgtgaaccgtccccacccttggtctgccatgccatgatctgtgattctcataggactgactccacgggaccaacgtgtaataataaccacagttaccccttatgaaatgcctcacagaagccaggcactgagctaaggcagaggaaatgacctcattcattcttaataatgcccctttagaatgagcgttcaggaaattgagactcaaggaggtagagtgaggaacttggctgaggcttcacagtcagcaagaggcagagacaggatttgaacccaggtctgattgacttcaatgtccatgactttaacaccaacttgctgcttcttagcctgaccgagacaacagagatacagaagtcactgtccttgttctcaagaagcttgggatccagtagcggagttacatgagtgaacaaattgcaattaggtgggaataccagaaatgatagaagtgacactaggtcctgaggtggcacagagcagggaggtgtgaacctggatggtgtgtttttcatgactgctgatggcaagtgacaggactccaactcaacttggtttaaggaaggaaaaaggcaggggtggggcagagattgattggctcatgtttctgaaaagttcggggcaactggcttcaagcatggctttatccaggaactcaagaacgtcaacaggagtctctcccctgcttcagctgtgctttcagccacactgacattattttgaagatgacgccactctctgacaggcaagttgtccaccagaggcaccctccaaggtcaacatggttagcaacccctctgaaaggagagcccctgtttactcttaatttcagccaaattcccaggtttgagtgttggtgaatttgctcaggtcacatgccactctctcaatcactcattgtagtctccataaagatggaatcattgattgactattggccaggtctgggtcctctgctcagtcctgaaattgaagggagccagccccatgcaaatcaggacactgtcacggggagaaggggaagcaggatgccaagtgggcaaagacagtggcattccacaggtgagggaggcttccgtaagaggagccctggagcttagtcccgagaacgaacagagcatgctgggcagagctggggctgcgaggagagggtgtttcctaccagagagaacagactgtggacgtgtgaactcatagtttggcatagctggaggctatggtgggtgtgggagaggagtgtgaggtgtggcagagaggggcccagtgagggtcttcaaacctgtggaccacgcaggcgtttggacttgctcctgcaggtaccctagggaggtagcacctcaggctcagggcggaggctctggactggatcccctggcctgaccctgcctctctgagtgactcagtctatctgattctcagcttccccatctgcaaaacaggaaggatggaggacaacttcacagaatggaggtgagggcaaactgaggcaaagccatgataagcagagagacaacatagaggaagtgttcaaagacacagaccattattgtggaccaatcttaagcatcagaggaacatatctaatctccactctagaaagctcccccgggggtgcagtggagggtggggacaggagaccagtgggaagaggtgagtttgatggttcaggtcctagaagatgtagagaaacactgctttgggggagatggagaacacagagagagggctcagggagagaaaattccatggcacttggcaaagaatcaaatgtggggagagggaaaaatccaggataaaaataaacacggagacaaaaatctacccttgaccttggatcccttaacttttaacttttgaacaaacacattttctcttaaaagcattcaaccaatttccctaggcttttttttttctcttcaaataccctccccaaaaaacatccctagactgcgcgattcccagtgttgaaatcttaggtatctttttcttttttaaatttcagcctgaacatgccaagctgaacatgctcagaatgtccttcccaccttggcagcccctgaagcccacctcctcctgtttgccctactgggtaagtgtacccagttttctaggaaaccagtgtttggtacgatgggaacatgcgcttgtttgggtgggtttacgagcaatttcattcaccatgctgagtctaaacgtcaagtaggttttcaagacccgagttctactgaattctacaaaataaaaatacattcagtatttattatgaaaaaaataaaaataaaaaaataaaagaagaaaagaaaggaaatgggggagaaaagaagtaggaagaagaggagaaaaagaaacagcagcagccatggtgaattcaaaagaaaacaaaattttaatccaaaaagcccctcagtcacttcacagaatatttcacaagagctatttgatgtccaaatgtaaataatcatggtgctgagattttgtgtgaaactttgtcatttcaaagccatttttacagtcgtaaattagctaatcagcaaatgaatcagagacatacgggtcatatttcactcaaatcatatgattttaaattggagagaaactgctgttggaaaacaaatagtaaaagtgcttttaaacagatttttatttatctattttaatgttttgattttgtgaaggcccggagcttgatagctggatgaaacgaggttgtacaccaataggatcgggttgctcatcacgtttaatgagaatataaacctccgatttccattacggcacctatgcttccctgggtggaaacactcgagggaaggaaggggtaaataggcatgcctacctgtccctgtacccaataaagtctcagagagaattttccctggggaaccagctgctgagtagaccaaaccagattcacctgggatacacgtcaaaatgatgtagacgtttctctaaaaagggctttgaggctggtggcctttatacacattactctctgctgacagctgatgggcagtttccagacatctgaggcctggtggttagtaagaatcataacaggtcgggcacggtggctcatgcctgtaatcccagcactttgggaggtcgaggcgagaggaacacctgaggtcaggagatcaagaccagcctggccaacaatggtgaaaccccgtatctactaaaaacacaaaaattagccaggcgtggtcatgggcgcctgtaatcccagctactccggaggctgagacaggagaaccacttgaacccaggaggcggaagttgcagtgagcagagatcacaccactgcactccagccttggcaacagagtgagactccatctcaaaaaaaaaaaaaaaaaaaaaaaaaaaaaaaaaagaagaatcatagcaatattagcggaagcctactacattgttactaagtgccaggcactattccaggtgcttggcattcattaactcatttaatctgatgatgaccctatgtactgttttcccctctatgtgtagttcaggaaggggaggttaaagatggtcatgttatccaagatcaccagttgttatatgctgaaatgatgttcaaacccaggcagcagggctccagagttcaggttgttaaccgctgggctagactgccgccccaggcacagtggaggtcaggagagcctcctctccttgccgcccagcacccgtgggggagttaaggcattcctttgcagttgttccccagcactgccatctgcctgggtttctcccaaagatgtcatttcatgaacttggcttctccaaggccaagtctggggaccctcttggtctttctgggccctggagaatgagctctcccctgggcttggcctccccctcctcctgcacaggccctatctgtttcgctgacagagtggaaacctcttagacggggaggaagattgagagggagtgggcagtatatacttccagaaaagagcctcattttttgttccacgtcccaagtcttccatagtgagaagggccctgagctcagaggaggctgagagaacaggcctgaggttgcctcctgcaccggccccactcctcctccctcatgttactccagccacactggcctcctttctgtccttcaaaaccaccaagcactttcctacctcctgcctttgcccatgctttcccctctgcctggacacctcttccctaaggcctccagacttctacttacagcactttgggaggccgaggcaggcggatcacgaggtcaggggttcaagaccagcctgaacaacatggtgaaaccctgtttctaataaaaaatacaaaaattagccgggcgtggtggtacgcgcctgtaatcccagctactcaggaggctgaggcaggagaattgcttgaatctgggaggcggaggttgcagtgagcagagatcacgccattgcactccagcctgggcgacagagtgagactccatctcaaaaaaaaaacaaatgcctccctttcccagaaacctctcaccacatcgtccgaggcacccccaaccctctacttgttgctcctggtttttccgactggtgcccttaggcagtttgcaacatttattcattcgcacatctaattgctcactgacttgtgattctcccttttcgcttttgccctccaggaagctgtgtctctatgcacctatataatagtatccaacaacacaatatctagcccagagccccacgctaaacctggaacacagtacatgctcaagaaatacttactgaacaataaaaagatcaatcagattctggtttcagagaggagctctaataaaagaattttcctcctcttcatcttctgtttctgggcttcaaactccatgagagctggactggagtcccgagatgcatatgcaaatttattttcatttcattttaatttgacaaacatggaaagctgggacatggaatccaggtctactggttcctgccctcagggagcttcaacttggtgaagtgggcagggtgggagggggacagacaaaggaggcagggtgtccccagcagaggagtggaagatgcaaaggcctagaggtgggaaagatcatggcgtatttggggagcctctgtggcttggcatgactggatcaggaggacaggtggcagaaaacaaagctggagagtccttcagtgtgtcagtgtgaaggacagtcaagtccttcagtgtgtcaggcttacacagtagggacccctgagggttttgcacctccaagtgtggtggggttgaccagtgtggagcgggcaagacagaggcagggggtcccacaaaggggcaatgacagccatccaggcaggacgaggactgagcgtgctgacgggagaacagaggtaagggctattcagaaacaaatgtcggcctttccatgacgcagtcagggagaggaagaagaaagggcaaggaagacccagaggttcccgtgggagactatctcagggacccacacttcccagtggcaccctggccactcccacagctctcatctgaataagctt

SEQ ID NO: 12 - DNA, 119160 bp, Homo sapiens
aagcttcccaactgatacagaagaggaggtagtatttgaagaatgagtcttggagagaaaagagagagctttttaggaaggggatacagtccagacaaagatgttgaggaaacaggaaaagtacatgggagggcagtaggtccgtggcaggtgtagttctaagaagaggccagatagggctcagcccattaggcgcaccccctttccattccctctttgcctctctctatccattcattcctcctttatttggaggagggtctttgttgcccaggctggagtgcaatggcacaatcatggctcactgcagcctcaacctcccgggctcaagtaatccttccacctcagcttcccaagtaggtgggactacagatgaacaccaccagctgagctaattcttaatttttatttttgtagaaacagggtctcactatgttgcccaagccggtctcaaacttctggactcaagcgatcctcccacctaggcctcccaaagtgctaggaatacaggcatgagctatctcacccggccccttcattcctcttgaggggctcctcttcttcaactggtgtcctctccaatgtacctaagaggaagatgcaggtggcagaagcctgagcttagacataaaatgtttattgagtgctcatacgtgccagtcctgtgctgagctgcagtgaatgagagatggttccttggaacagagctcccagttcagagacagagactaaaacataaacctatgtttctaaacatatggtcaatttcaggcgaaagaatttcagatggcttctggactaacatttgctttttattttaacgttacaagtttattttgatgatcaatttctatatatgatagaaatataaattttctttttaaatacatttaagcaaataaataaagagttaatttaaggaaaactaggtggtaatgttacaggtggtatgtggatatagtaaaacttgtgcaatgagaattaagtaaatatgtgcatgtgtgtgtgtatgtgtgaatgagtgacatgtttgtctgctcagtcttttttccaggcatatgagagcagtcttctgttcttttaggaactggtgctcctgaattttatatagtttcactgggagacaccctgtatatgtgcaagcttccccactcccactgtagttgattggtcccggatttttcaaacatgaaaagcccctctctggtggcagaggctatgaggcacagctgtgggcgacctgttccttgccctactatggacattgagttggagagaaggaagcaggccaagagaaggagaaacaggagatatagttgattctcatttctggtggtagttatgttctgtaaagttgccacaaatgaaactagtgaacaccaacctattgctcccagaggaaccacaggttaggttcctgtgagcttctggtcacagcattttcatccatggatcaacacataccttgttgtatgtgtgtttctgtttaaacactttatttaatatatattgttgattcattgacactcaacgcatggtcagcagcaccgtaactaccggacgaagcttctccagataaaaatgtggcactaaatggaccttgaaaaggatgcttgtttataaaaagagagctgaacaagaagaagggcattgccttgtttgaccttagctggaaacatgtgcatcatgtgactcaaaaaattatcacagccgggtgcattggctcacacctgtaatcccactgttttgaggtcaggggttcaagaccagcctggccaacatggcgaaccccgtctctattaaaaagacaaaaattagctgggtgtggtggcgggcatctgtagtcccagctacttgggggtctgaggcaggacaatttcttgaacccgggaggcagaggttgcagtgagccaagactgtgccactgtactccagcctgggcaacagagtgagattctgtctcaaaaacaacaacaacaaaaaaattatcaccactccatgcatgcccatgaacaaccatgaaagtaccatgaataggccgggcacggtggctcacgcctggaatcccagcactttgggaggccaaggggggcggatcatgaggtcaggagatcgagaccatcctggctaacacagtgaaaccccgtctctaccaaaaatacaaaaaattagccgggcgtggtgacgggctcctgtaatcccggctactcgggaggctgaggcaggagaatggcatgaacccgggaggtggagcttgcagtgagcccagatagcaccactgcagtctggcctgggtgaaagagcgagactgtctctaaaaaaaaaaaaaaaaaaaaaaaaaaaaaagaaagtaccatgaatatttacttggggattgattgcaaatacattttggcaagtaagtgaattcacaaatagagaatctgtgattagtaagaatcaaatgcagatagatgatagatagatagatagatagatagattagatagatagatgatagataaatagatagatagatagatagatagatagatagatagatagatagatagatagatagatgatagatatgttgaggtggagaggccctcagctctggtggggattgagtcactggccctagctatctcccagtccttcttatagtttgactattcaatttttgtttgattatatgaaatatttcagaggccttctcaaatccaccctttttcgttttctcctaagctgattcagatggagttctgttgcttacaaccaaaagagttctgacttagcatacaaagccctggcacatagtaggtccttagtgaatgtgagtcgcttcctttcatcactgaatgcagggttggctaaaggtaaccctagactgtatgtcacagggagaggcagcagtgaggagaagaaaggctttataatttaaaaacacagggagacaacatatttccaactcttcatttaccctgagctgcagcagcagtcatttcttgccacgttccagtacagatggaaaagtcactgaattacaaacctagttgcaagctatttttggtggagttgtatgtggtggtgctggtgggttgtgtgtgtgtgtaatgtacgcattgggattcttggccactgcctctgtttgtatcagctgtcagcaaatcagaggcgccatccacgtttgtcataattcattacattaattaaccacttttgagaactgggcgcgggccagaggggatgcgggggagggaagcctccatattgttgtgtctcaacctcctaggtcagaatttccacggtttgatgggctgccatcgcctgcacatgtgtcccctaacgcgcggaccttgatgaaatcatcatgtttacatctttgaatattctctgcagatgatgcctatggcgggaagccagaggcaaacagcatcccagaacttggctctggaggcccaactctgtacccaaaagagtttggaattaccctgacgtctgataccaaactgggcgtccttctccagcctgtccctccctggccagttccctgggccggctgcctggcctaggccttctgcaggacaaatggcgccagctcaagacccagtgaggtgaagccatcctttttccgtgccccccatttcagtgagtggtgccattgcccacccagctgccaggcttggaccctgcgggtcattcttgactcttggcccatcccatctccatatcctgttgatctctttttattcacatttctcaagacctctccagctctaggtgaccatgatctgtgcctccatcatcactcacctggaccaccaccgcaaactcatctctagtcttcttttgccctgtcttgccttccatctttccagcaggctgcagccagagagatttttaaaaatttttattttttatttatttttttaattaattattttttttttgagatggagtttcactcttgttgcccagagctggagtgcagtggtgcgatcttggctcacagcaacctctgcctcctgggttcaagagattctcctgcctcagcctcccgagtagctgggattacaggcatgcaccatcacacctggctaattttttatttttagtagagatggggtttcaccatgttggccaggctggtctcgaactcccgacctcaggtgatccgcccgcctcagcctcccaaagtgctgggattacaggcgtgagccactgcacccggccccagggagattttttaaaacacgaatggaagcatgccactgtcctgcttaaatctcgccatgctttttcatcgaccctgggactctacgatgctttacaaggtccttccagacctggctcaccctgccaatcattgattcctgtccatttccaagccttattctccaacctcccagtcacttcttccaatacattttcttatgtttctttctgtttcatgcaaccaaagttcctgattcctgaatcatcaaaagtttttattggttctgcatatcagattaagggcaattttgtttatcttttttgaacaaaaatgtcctaggttctaactgtgtgctcagcaactgagccaccaattaatgtttggctactgaatctttggtgcttagaaactaggtctttggtgacatcacttaagctatcagatcaaaccttacctgaagctagtgtcaaaatgttctgtcctgagtcaacagattcttcttgttgactaagctagtttgaattaagtttcaacacagacattgaatcacaaactgtttttggacaaagacaacatctgcttcatcctcactcaattatctgctagggtgggcttgttatttgtattatccaggcctattatcaacctctttcctatcttggtgatgagagtaattgccctctgcacatcacttggacagtccacaaagccctgcacatccattatctcatttaaacctgtcgacaatcctgggaggtgtgtggaatttatccatttcatacatgagagaactgaggctcggagaggtaacaggcttgcccaaggtcacatggctagtgagaagcagagctaatcttttttatttatttatcaggttttttacatatgtatacatgtgccatgttggtgtgctgcacccattaactcatcatttacattaggtatatctcctaatgctatccctcccccatccccccaccccacgacaggccccggtgtgtgatgttccccaccctgtgtccaagtgttctcattgttcagttcccaactatgagtgagaacatgcggtgtttggttttctgtccttgcgatagttgaagcagagctaatcttaaatcctgtcctctgattcagaacttatatgctttcttaatattcattaaatcattcattcatttaagaacagcaaagatcattgaatgcttgccacatgcagacagcttgctaaactttgttgattcatcagtgaacaagacaaggtctcggtccttaaggaacttactatctaacaggagacacagacagtggcgatgttgtgtggaaacacctatgatgagggggtcacctcttcatcctgagcctagacagctgggcaccaagacttgactatttccagtctccttgtgtctctgctttaagactcaacttccaggtttgggtggggtaggggcagattggaacatatgcaataaactgtgtgctatggggaacaggcaactcctcagaaggaaattgggacatttctaggaaggggaagtagcaacaacaaatgtctactttaatttaggatactggagccatttactggagtccagggttatagtgcctgaatgatggttaaggagttatagttgctgtagggtctgcattagagcttttattaagtgatttcacttcattttggacattaggtttttgtcccctaagtccttttgacttattttggaaccatcttctatgaatgttgctaaaccttttaaggagaaagtagaagttggtgaggaggattgatgcattttctcatcatctactgcagcaatgtaaatacgtactgtctactttccccaacccacccatagaagacatgactaatcgattctggtattcttccccactgagcccagatcaagcctcagaaatcttatcagtgtgctccaggcagccacaaccagtggatcagagttggcacatgaggtgaaacatatttgtgagttctgtttttggactgtggggccttggggaaaaattccttcttttctctggacctcagtttttccatctgttaaataatgacccaaatgacctgtaaggtgtcttccagttctgacagtttgggacaggaaagtctttaagtcattgggtggaaagttgtgtcctggggcaggtttttagcctctagatggagttttctgtcccactcccttggagcctttggggctgcaaagtggtaggaatcaaatcatatgctggggaatagactaaatattttcttcacaatatgtctaggtaatactgctagagaacacccaagggctaagtggtgtggattcaggaagcctcagtagacaacatcaagggtagttggcatttatcaagtgctgttcggtgtgcctggctccaaacccaatctccaagttaatcttctaattaccattttacagataaggacactgaattcagatggttgcatgcctgtccacagtcagagcagagccaggattggagctcgggttccgagtccatagctctttccctattccacctgtctccagttagagaggccctaaggggagggtctttgttacacattgtgatttgccaagcccagccccacttcagggtcactcctctctttgatcaaacccagtttgatctttacttcttggaaatttctctgctcaacccaaatagggatgtgttctctttgtctccctcccccagggtggtagacacctcctagatgctcaccaacaccatctccttaatccccagcctcccttgcagttaagtggggcagtgtgactagttccagccaatggaatatggacaagtgaggtacgtgacttctgggccagcccacaaaatgttccacgcagtcctccatgacgtccttctcttgcttgttggccgacctccagtaggggaatctagcagaagactccaaggaggcctggatctcataatgactgcggggagcagaagctcctgcccatgcactgtaccatgtgatgtcttcctaagtcattgagatgctgggattatttgttaaagcagcttgcattaaatagcctgacaaatacccccagcatcttgtaattcatttctactgaaacaacaaccgcactgcattgtaattggttatttatctgtcttacccagtgggttggaagctgcttgagggcagatatgagattcatctatgtcctgtgtccagcacaagaagacattcttcatttattcgatcaatgcacaaaaacaccttgagatgcagcaaaactgtgaagtttgcaggctctggagttggggtgggtgggttggaatctttattttttcccctgttgcttggatcaccttgggcaaggtacttaacctctctgagcttagttttctaatctgtaaagtggtgataacagaagtacctacctcatagaattgtcacgaggcttaaatgaggttgtgtgtttagcccatatctagcaagcagtaagcactcaataaataggactcctattgttataataggacaatagctattattgtccacatttacactgagatccagagaggccgcttgactgattcaagatccctcaataaaggagagagatagtgtttggattcagctctccttctttctgctgtgcttgagggagcttgtcagccatcttggtcttttttcctggagctctgggtggcagccagcaaccccagtgggagtggtgacctgggagtttttaacaccttcaggtgctaagtggccttcaggtgctaagctgaggcaaagggcagtgatttgcttccctggggatcatcatacacttgcttgaaagacctttcagggtggaaatgtcacctgggaaccagtgtccctaccctggaggagccaggctgtaccctggggacactcctggaactcccagggaccccgcctgagagcccttgttgccagggcagccgttgggcttgaagagccccaggagctccaatgtggggccagcttcactcttttccaggctgtctgtttttctccccttctacctctcctcctcctccttcttctgaaaaatactcagcagtttttgagctgctttggcaatctctgggcttgaatttcaagacctgcagcctttgaggacaggagcccagaggaaggttttcagatctgtgacccagacggcaggaagtgctggggtttcctgcagggtgggagaggtagggccatgctggggtttccccaggcaggatgggaggggtcccagcagtagtctgacttcagtcccctgggaaatttagggaaaaggcccacagggagtgctggggaattttagggcatcctggcctggtgcagtgatgacagcccacagcagtcctggggtcccctgccacgtgcccagggctggccttctgtgggtgctgagctccacctcttccctggccttcttgcccccttctaaaacacactgcacacttgcccacctctgtgccattctcctgtactgcctcccctctccctttaccacctagtgccccacactcatgttacctgaactcaccccttcctggggagggtcccctggcctcttacagcctcaggcatgctcctcctcagggactgtcctgtactaaccaaagaatgccttgaaggcagggcccttgactgttcacctttgagccagtgcctcagtgagtgaatgaatgaaccagagggggaatgaatgaaagagggaaagaatgagcaggaacagtgactgcctgtgtgaatgagtgaatgagtcaatgagtgcatgaaggaatgaatgaacgcgcccaagtgggagtgatgggggagctggggcttctgggtggtccctgggtcagcagcggcagcagaaaaggaggcactagctggcgggggaaggaccagcctgaggggtctcttccccatctgcagtgctccgcccctcttctggctcctgtatcccctcaggctcccatccctggccacgctcagagaaccccccaggccccccggttagggttttcttggctggatcctcctaggaggctgtttctcttggatgaagccttcccctgacccctcctcccctccccaagtcctcataaaatgttcaaagtattttcttttactcaataaagtaaacaaaggcaagggcagcctcgaggctgaatttgcatccccttggctctgctcagcctaggctaacaacctccttcagcagcagaagtctttgccgctctactccacagatgggaaaacagggcttgtaggggtcaaggccattctgttaaggagcgtgagacacaaacttgacctgggccttcagacgtggatctggggagaaccatccccttctcagtggctcctcttgacctcactttgattccagtaggtgacagtgcaggggtgccctggggtgggtcccttggagccttggtggtgagagtccgcaggtttttctgcaagaggctacaatatggctgtgtgcatcttctgctgaacagctacggtacataggcaggaggatggcagagccaaggggagggccttccccactgctgaggaaggttggacgccccacctggggctccactgggaccgaagagactcgggtcggggtgcagggtgggcagaaccatagaaaggagcatgcactccctgagcattcattgcaacagcccccctaggtgggaactattatcaccatctttttttttttttgagacagagttttcctcttgttgcccaggctggagtgcagtggcgccatctcggctcaccacaacctccacctcccaggttcaagtgattctcctgcctcagcctcccgagtagctgggattacaggcatgtgccactacgcctggctaattttttattttttttgtatttttagtagagatggtgtttcacaatgttggccaggctggtctcgcactcctgacctcaggtgatcacctgccttggcctcccaaagtgctgggattacaggtgttagccaccgcgtccagcctatcaccatcttacagatgatgaaattaaggcccagagaggtgacatgacttgtccaaggtcacacaggtggtgaatagtggggccaggattcaatcgaagcatccttcaagtctcccaagcctgggttcttactcattctgctagttgggtgaggacctgagtgggaaggctgcaagtccaggtgtgagctggcatcagacctgtgaggtgcttagcagggtgcaggtgcagagtgggtgcttttctggatgtatggttgtgtgccttcctccgactgaagaccaagactcccaggaagatggggactttccgttcttgcaggagtctggattctccttggttaatcagttctcccagaagcctaaccactttcttcagtcttctgtgcagatagatgctctccagcactcactttgggccggtccccctttctgactgctctcatcccacatccctgtggtgggtggagctggctccttggaaaagggggttccttttagacagccctgccctccacctccctttccactcgctggcctcggccagccccctgggcccagctcgagaacagacactcacccctctgccaagcacggagtgggaagggaagggctgtgcagccccagccaggagtcccagccagggaacagatcaagagcggatgggatgatgggggccactgaggttctgggaccaaggcatgaaggcatgggaactttgggctgcggtgggtcaaggggtggccaggaggtcaagggaggagcagggggctccctatccccagctcagcctgggtgtgaaagccaggagtcttctagttgcagctggagggggcacacagtgggaaatagcctcactccattgctccttaaaggggccagccaggcttcttaaagtggcagctcctgggcagggaggggccccgggagagcttggcctctcagccctgggagcagagcttctttccatcaggcagtgagtccacctaccatagagatgccctggtttcctgcctcctcaccatcatggcatctagaaaggcctcctcccacatgagggggctgtggggttgggcccctcatctgccttggcctgcgtgtccagtcctgggcctggcccaaaagagagcctcagtgactactgagaagtagatgatttgatgaagggaccgggctggagctgtgagctgagaccccagagtacaaccggagctcttcccaacccagggtatgagcttggtccaaatggatcctggcagagacgggcactccttggtcaatctgtttctgaaccttgccatctccactcatcccaaactttccagccccatagcacatctgacatctgtgatgtgcttttcctatgtgataaatggacaccgtaacttagtatttagggaccagacaggctgagttcaaatcctcgctctgcctattcctagatatttctgtttcctctctgcaaatggagctatgagtaataatatattggggcattgttgaaaggcttagatcatctaaagcagcgacagtgatgagaacaggacctgatcttaaagggtgcaataaacggtagctcttacttttactacgaacggcatgtgcagaggatactatgcttttctgtcagctcagaaaactgggtagctgagaggcaaatgacatgtccaaggtcacccagaaaatatacagcagagccaggatttgaactcaggtccagctgagccaaagcctgctttctttgtgtcatcatgcaccacctccttccacatcttgccctgggagtgcgtgatcactggggctcgggagctgctaagtgctggggtaggggatagcattttactagggtcctgggggccagtggctgaccagatccatgccctccttcccctggcctaatgctgcagatctcaggatgtcaaagggggtgatgtcagacagtcatgctgggtgggaatggctctgaaagcctgcagccccttcctcgcatggagcctcagcttcctcgcctgtaggttgggatgatccgacagaggcattgtgagtctcagctgagctataactcgtgagaaagcttttcggacacatagcaggcaaggcctcccaggttggaggacaggaagggagcctgtctgagtagggaagggagctggccgtgtccacagcctccaaccctcggcctcagccccggcccacagctgggcctggactcctgctcgtggccgcccctctcatgggtctgcggggatttctctgctccaggctgaccccttccttgcagaggaggcttctgttgcccgtccgctctgctgggcctgggctattctctgtgtttgtgtgtgtgggggttggggataggtgggggtcctcttggattctgtgatggagggaatcctggcgtccctgtggagtcagcctgggccgccgccggctcagccgtccttcccagagcctctgcagcccttctggctgccgttgcctgcagattcccggcgaatggtgctcctgagaccgctatgggcccaggctgcgtcattcccaccctccctgagctctgggactagctgggcagggctccagccctgggaactccgcctgctgcttttttccccttcttcgaaatttcactgtatgattcaatgaaatgtcctctgcttcccgtcacctggcttggctaagctgaccttgtagtgtggagcagagagcactggacctggagctcaggtgctggcctgcgttctgccttggatgtcctgtgtgaccgcaggagagcgcctttacctctgtgggcctcggtttttccatccgtaaaatggactgggaggatggtagtgagggtgtgtctagcaatagaagaggggagaatgagaactgcctctgcaccctctcatgcctgtcttctctctctatggtggccactgtctcttccttctttgcagagatgtttacccaggggtctaagccagagcttccttctctgccctccctgccaagccagcgtacagatcactggtcccagggtcggctgtggtagccctaggttggaacacacccctggttccaagaaggtccccgtctaatatgtgagtccacaggtccttccttcactatcctccccacccaggctaaaggctgaggcacccccaaccaggtggggcttcaccactagagggcgcccacccccccacaacatgattaaaaaaataaaacccaaacggcctaccccaactaaacgtaatcgttacagcaattattgagcatttattatgtgtcaggtgctgtactaatccctacaacacccctagaaggtatacagtgacatcattcccacttaacagatgacaagaccgaggtctggagaagtaaaatgactcacccaagaccacccagctggtcagtgacagagctgggaccagcaaccaggtctaagcagtggagtcccaggcccaatgcagaggcctcatggcacccagagtcagccactgcagtggggaggatggctgggatgggagctgaaggtggaggctaggattgatgagatcagagaccaccaaaggaaacgtttgtaaaccttcacaaaattcggcagcttttcaaaataatgataatggtaggttacatccatagagcactcaccatgtggcaaacacaataccaagagttctatatacacaatctcccctaatactaggaacaacccaaacgggggtatgttccagtattatttctgttacagatggggagactgaggatcaatgaggtgaagtgtcttgcccaaccttgctcatttgaacccaggtctgtttgcctctggagcttgtgacttaacttctgcattctgctgcttttctcctttagaagaatcttatccagaatcccaacatttaagagataaaagtgggtggaagcagaggaggtgggggtacaggagcctgaagctttccaggccagtttgaaaagccctgatcgaatgcccccctctccaagccccagacaggagcagggacttgcccacgggcccagagctggttaggggtagagcccccagaccactacttgctccctctgtgggtgctaccttgactttgagataaggtccaggcctcaggtgacaggggtagatgctttaatctttggcctcagcaactgggcagagaaccttatatccctgatgaagagacttccaccctgactagagactctgggacatgtgggctgtcataggcagtggcagccgaggggtggcttgggggatggacatgtgggtcccctaaatctccatcagtctttcccccaagccatagtaaacaagaggcccttttctcacctctgagtagtgtgcagtcccaaaccccctcctgggtaggatcctgggtcctggagcagactgtggtcatgtgagttgaatcaatgaccccctggctgtgtgtctagcttgggagcactagggggggatatggtctccgtaccatgcgaagtcctgtttctgtgtaatgcagtgaattcctacccaggtcccacctgggattcaccttgttcttttgtaggagtcgaatctctgcaattgtctgacttctgcagtgatgctgggggaattaaatgtagctgcagtacgtacaagacatatcctgcagtgggggaacactgtcaggtgggtcccgctggggctggggacatgggaaccaataatgtgtgtgaagcacttagtggggaccaggcccagggctcagcatgatcactctgaatccatacagcagccctgcaaggtaggcactctggagcttgtgacttaacttccgcattctgctgcttctctttctttagaagaatcgtttctagaatcccaatatttaagggataaaagtgggtggaagctgaggaggtggggggtacaggagcccaagagtccccaaggccacagtgctttcacccctctatgaggatgcataaaacagagcctcagagaggctaagtggcatgttcagggtcgtccagctgcgaagtgtcgcagctgggatttgaaccctggttggctggactcaaaggtcccacattgttctactctgccctgctggagcacctgtgtagactgttagattggttcagtgaagcatgcctgctattgacacccttgcgtagtcccttttgaggtgacttgttacgtagcagcgatagatcgttaaaacagttcctgggaggagtcactgaacaaggctgggagtgagattaggaaactttcttttttagtttcttgctcttgaaagatcaagtccctgtgagtttggagcacctctgcaggattcctcctgagcagaaatgaaggacaaggagggcttggcagcgagagctcaatattcatgcatcgctgtgttctctgctcctcctggccacgtggctccactgctcttccctttcttctttccaattaggtgtggccatgtacatgatttctaggttgtggagtgtggtggaagtgattcatgccactttgggcctggcccaaaaaactctcctatgagcccccttctcttttcttgccccttggctgagaggagaggactctgagggcctcgaagaggatggaagcacaggatggaagaggcttgggccctgaatgactgcatggaggctgcctggccaggagcacctgcatcggactgtgatgtgaaggagaaacgagatttcattgtgtaaaagccactcgctgaggagccgggactacctggtcaggacctagttttccctaactaatccagagggtaaggagaggtcttgctgagaacatgggatgtgggccttccagtgtccaaggggaagttggatcaagagggagagaaatgtaccccactgtccctgggtgctgtagatactgggtcttggcctcctgggggaagaagggctttgaggtgttttcttgacaaatcatttgttgagcacccgctctgagccagtgtctgtctcagcctggagaggcagagatggcgaagctttgctctcaaagtgctcacagtgtgttagggagacaaaggcaggtcagggtcaggtgatgccaacctctcaggagccataagctcccctgatacagggcaggtggggagggtaaataaattagtgaggaggccaagtgtgaggcaatagggaatggtggggattgtggtgaacttcagagacacacctggcggtggtggcagcttccatcagctgcagtctcttgttgccacatgggtccatattctcacactgggttcatgggaaaatggaccctgtgtggacagagcctccagttttttaagtcaaatcagaaattttgatacttatgtgaattctcctatttttcaaaacttgaaaattaacttaaaactaacattaaaaatctgagaaaaaagcatcgccagaaaagttaaaaattaaaaaaacaaaaacagaacaaaacaaagccggctgggtgcagtggctcacgcctgtaatcccaacacttcgggaggccgaggcaggtggatcacttgaggtcaggagttcgagaccagcctggccaacatggcaaaacctcgtgtctactaaaaatacaaaaattagctgggcatggtgctgggcacctgtaatcccaactacttgggaggcttagacaggagaatggtttgaacctgggaggcggaggttgcagtgagccgagattgtgccattgcactccggcctgggtgacaagagtaaaactctaaaacaaacaaaaacaaacaaacaaaaaaacccaaccaaaatccccctggggttttggcttacaacctctgtgataatatgttataaggggcttgtgggatgcttgaggctgggactctaactcatcctgggagtgtctacagaaaggggaaaccttacctgagacatgaagggtgaggagagagtaggaaagagaagaggcagaagaggaaagctgaatcgggcagtggcacagcttgagcaaaggcatggagggcagagctgcaggcaatttgcttttttgagtatcccggatgtaacatggcacctgtactacctacaccctcctaatggaagccatcttagggggcaccaaagtaggagtcttgggtttttgggggtaaagggacagggagagaagggactcctgagaaacatacaagggaaatcctttgtcaaggtaaagcgctaacaaactctagggacagattattttctctccagctttagttgagttttgctctttgcagcactatctctctgtcacgggcaaaagccctgttcttgaggtgctttggggaatgaagaagtgtgggctgtgttcatgcttgggacaagcagggtggagcggagccagcaactggtggccaaggtggcagaagtgaccagggaacagctgacagtgggcttcaggagcaggagacagaacactgagggaaggtaggcgccgctggggatctcctgggaagcagtgaggagggtgccgcgtgtcctgcaggtacccgtggggcggggctcgagtgcctgtatctgcaggttgaagggaagggtggccccagctgcctcagggtcacacatgatgagatggcatttggctgggctgccgggagggccctggacacagtgcggtgccacagaaccccactccacgccctgggctctttctctgccaaggaaggtgactggtccagactgagatggcaagcctttccatctcatgaggcactctgggcggactggctgtggttttggataaatgtgaatttcaggctgcacagggttcggcaagaaagagtgcctgagatggattcaccctgccaaggtgccgagcgcggggacagcgtccattcctgcctgtggacaactctacttccaaaggaacagaagttgtccttgctctcaggttcgcctgacctaggttgtccctccctccaaatcttcagatgttttcctcttagagggtctgactgtgatcctcctcctctgggacccggtatccacgcccatcaacgggaaatgctgatagtggtaagaaagcctgccctcccctatcttgcaagatgccgtagaggtaaaatgacatctgttgtttgtgcttcgattcctataaaaacttgtttatgagattaaactcaactctgcaattttaagtattgtgacttgtgaccttataatacacagataatacttaactttctccaccccaattgaataattttgtttgtctattttttgtttttgtttttctcccacttggaaaagtatattctttttttctcatatatttaatggcctttatctcacaataatctgtccagataaactcttttttgagacaagatcttgctctgtcacgtgggctggagtgcagtggtgtgatcacggccactgcagcctcgacctcccaggctcaagtgattctcccacctcagccttcagagtagctgagattacaggcgcatgccaccatgcctggctaatttttggtagagatggggttttaccatgtttcccaggctggtcttgaactcctgggctcaagcactcctcctgcctcggcctcccaaagtgaatttatttttaaaatattattattcttttctgactataagcagaaaaatgcaaacacattgtaaacattccaaagaagatgcagacttgcaaaaggtaggagacatctttaaaatttctcttcctttgatattagtcttagtcttatatctttgtcttctatgtctatgtcttgtatctttaaaaccatcgcatcaaaagaaccactatcaagagcagcacatatcttttcagaatatttaacaaaatatttgtctacctccctattatgtatatatgtatgcttacatgcactgcagacttttctgcaacttgctttagcttatagtcatacctcagtatccatgagagtttggttccaggatccccacgataacacaatacaagaattctcaagtctcagtctgcctcgcgggaacctgtggatacaagaaatcagcccacaggtttggcatctgcagtttgttgaaccaagggtgtggaacccgtagatctggggagcagccttttgttttagacatctttcacttccactgtcttctcccataccatatcatcatttatgtagttaatcctctcttgatggtcatttgtattgttgcaaaattcctatctttgtgtgtttgcccagttttattttaggatgaattctagatgtgaacttgctgaattatcttccaaaaatgttgattcaatttatgttctcacaataatatgtgtaaagacctgttttctcatattgttagtagtaatatcaatcttttaaatctttactaaaaggcagggcaaaaaaaaaaagagagagaaaattcatcttcttgttcaggtatggagttttttgattatcggtgaggtgaagaatgttttcacgtattcaatggccatttgaagttctccgtgttgcatttgaatgtcatttcacacatctgctctcagtagcattgccttggtattgctcttaaatatctgtggagagctcagtacagcatttaaggcatagcagaggaatgagtgagtgatgaatgaatgaatgaatgaatgaatgaatgaatgaatgaatgaataaaaaagaacagtcacggccgggcatggcagctcatgactgtaatcccaacactttgggagaccaaggcgggcagatcacttgaggtcaggagttcgagaccagcctggccaacatggtgaaaccccatctctactaaaaatacaaaaattagcccagtgtggttgctggctgtaatcccagctacttgggaggctgaggcaggagaattgcttgaacctgggaaacagagattgcagtgagctgagatcgagctactgcactccagcctgggcaacagagcgagactctgtctcaaaacaaaaacaaaaacgaaaaagccccccaatcacttctggtctcagagatggtactaggggtggagaaattccccatttggtttcattgttggaaacagaatcccttagtcagaatcaccaatcactagggaaatgcaaatcaaaaccacaatgagatactacctcacactcattaagatggctactgtcaaaagaataaacaaaaaacaacaaaaaactttcagaaaataagaaatattggtgaggatggaaaaaaacaggaacacttgtgttggtgggaatgtaaaatggtgcagctgctacagaaaacaatatgctgagtttttcaaaaaaattaaaaatagaattttcatatgatttttcatatgattctgcaattcgtcttctgtatatgtacccaaaagaatgaaaagcatggacttgaagaggtacgtgtacagccatgttcatggcagctttattcacaatagctaaaagggggaagtaacccaagcgtccattgatggatgaatagataaacaaactgtgaccaacacctacaatggaatattattcaggacttaaaaagaaaagaaattctgacatatgccacaatacaggtgaactttgaagatgttatgctaagtgaaataagccagtccccaaaagacaaatattgcacgattccacgtatatgaggcacctagaatagtcacttttttttttttttgaggcggagtttcactcttgttgctggactggactgcagtggcatgatctgggctcactgcaacctacctccacctcctgggttcaagtgattctcctgcctcagcctccctagtagtagctgggattacaggtgcccaccaccacgtccggctaatttttgtatttttagtggagacggagtttcaccatgttggttaggctggtcttgaactcctgacctcaagtgatccacccgcctcggcctcccaaagtgctgggattacaggcgtgagccatcgtgcccggcctagaatggtcaaatttatcaagacagaaaatagagtggtggttaccaggggctggagagaggggtgagtggggagttgctgtttaacagacaggagtttcagttttgcaagatgaaaagcgttctggagattggctgtacaactgtgtgaatgtatttaacattactaaactgtacttaaagttggttaagatggtaacattttaaagtgcattttaccaacattttttaaaaagttagtttcttcctgcgcctggccgggagaaatgccctatttgcaaggaggactggcggctctcacatgagtaaaggcctggcgccaaggtctccagaacaccccctgcccaccgtgagaaggtggaactcggcaccaccgcactggagcacgcgttgccacttcagccacccaagcgccgtggggcaaatactacaattacgcattttgtaaagggagatgtgttttggaagaatttatctgcagaaatcataggactggacatttggtgagatttcccgagaaaagataaaaagaacaataacccaggtaaaatgccaaatcctcggtctgacgtcagtctccaagaatgactgccaagtgggctctgggaaatgggccacacccactcgtgtcccagccaatcagaagagtccaggcgaattcagccaaccagagctcggcattcctctgatgcagatgctcttgatttctgccaaggacacaactttgggcgctgggttggagaaatgattgttggcggcactttccaagcattaccgattaattgaaaatgcaaagcccacacgattagtaacataataattaacatttattgagcacttacacatcaagcatgttcaaactgccctcagaaaggtgaagtagcctgcctgaggccacataaataagtgttgtgggggttcttgcccctgattgccctactgcctctgtgaaatagtcattctcctcactgatactgagcaagggaatttagactgtaacctgtacacaaaaactctttgaggtaagggtgagtgctatcaccactttattttacatagcgattgataataaaaaaaaataagagatctgaaatatgtttcctattgggagagaattggcaaaggcagaaaacgtgaatcttgatctttcattaaaaaaaaaaacaaaaaacatcaacacaaaaccaccgcaaaaccgcaagctagcccatgtaattatttaagaaacgctcattgaatgaatgaactcgtgggggagtaagaagctacagagagacccactggagagccaccgagagtggcagatggcagtgtacaggaggacctgagggatgtttgctgatgcctgagtgaaaggacaaaagactgtgccgaaggatgatccgaggcagaaggttgtgagcactgcgcgcaggacagggagagtcaggggctgcacatcctttgctgtgttgcagtcagcagagcattcagggccagttctggtgctctctgggtggccccgtgcacagcacacagaattcccacacttgcacacagcgctgtctggtgggaacacacagacaaaacgtcccaagctggtagagccccacgcatagctggctctgcccattatcccagatacacccacaagcagacagctgcacctgcaagcacacacacaacacacaacacacacatgcctgtgagcacacacacaacacacaacacacacatgcctgcgagcacaaacacacaacacaacacacacacgccagggagcacacacacaacacacacatgcttgtgagcacacacacacaacacacaacacacacatgcctgtgagcacatatacacaacacacacatgcctgcaagcacacacatataatacacacaagcctgcaagcacatatgcacaacacggagcacacacatgcctgtgagaacacacacgcctgggagcacacacacacaatacacagcacacacacctgtgagcatacacatacaacacacgcatttctttgtgggtctcgtggacatcctaaatgaggaattctttccctacatgcctttttgttgttgctggcttgatccctccatcacccactcacgtttattgggcacctacagcgtgcaggccccgcgctaaaccctgggacgtgtcctcaggggccaggagagagaggcctcaactcaggaattaggagaactcaggtcaaggggggaaatagtgttggtaaatccactgtgttgctagtgggcctatttgggagagcctgtcagagaagctacggggagctggctctggttcagacatcttccaggaacacagaaaacaaccacattttactaattatagcgagggaaaacacgctgcgattacagctaaattacattaagacataactggctggctcggccggctctatctttctggatcaggtttcagccaagttgggtggtgacacaggcggggcaggctggcgaggccttggccgggggagggtcccgcagcctcttttcctgtggggtcgtgaccctggggtgacagtgtggtgtcccagggccagttgcagcttatgtgaccagcagctacccctccctacaaggggcttccctgggcccctgggctggaacaaactgcccagagggccgctgagtcatccagcccctcctctcctttccctcccagaactgaggatcagagaattcagggctggaaggaaggtcttggggccaaagccttggtctttcgaaggtaactgagtgggttgtttttttaaattctctctcctgttgtggccaccaactctgtcctttccttccaggccctggtctgcacctgccaagaagggcttggtacctgtttggggaaagagggggttgaactctccaccccattctctatgtaattattcccagagggcccgtgtctgattcatgccccacagaggaaggaaggaaggaaggaaaggagggacagagggagggagggagggagggagggaagaagggagggtgggagtcgaaggaaggaaggaggcaagggccaccaagggagagcgggaaggaggaaggaaggtggggagggagagaggcaggcagtgattaatgtaggaaagccaacttaccgagcacttgtggaatgccaggcatcgccatgcagtacctccttgaatcttcacaatgatcttgagggcaggagcccaaccttagggttccatggagactagagctgcacacaaggcaggtcctcaacagtaaattcagtaattccttgagtgagcaagtatgtcagtgaggtaggtaatatcactatttatagacagggcagtaacagctatggcatcatgggggtggggttcaaatccacctttccggccaggcttggtggctcacgcctgtaatcccagcactttgggaggccgaggcgagtggatcacttgaggtcaggagttcaagatcagcctggtaacatggtgaaacctcatctctactaaaaatacaaaaattagctgggtttggtggtgcgcgcccgtagtcccagctactcaggaggccgagacatgagaatcacttgaagctgggaggcgaaggttgcagtgagctgagatcgcgccattgcactccagcctgggcgacagagcaagacttcatcacaaaaaaacaaaaaagatccagcattctttgtctccaaggcttgctcactcagctctgcacccaggcttttcacctttcaccttgtggtgctaagagaagtggccattccagtgaccacatgacccccagatatgatgggagcttggttcccagcatcagtcttgccctgcttggcgtgggatgccagggtgcactgagccccagtcccacctttattctgccagcactgcgctttatatgcactatctcatttaaccctcacaccacgggctggggagggggtggcttccaataccctcattttttggatgaggaccctggggctcagagaagtaaagtggcttgcccaagttcacacagctgccaactgggggtgctggggttcccgtcctatatggggcacctggctccatactgtcaggcccaagtttatagaatccctgaggggcctggtctctggtcacttcctcagggccagcctaaaggcaagagcagggggcagggtaggaggccctctcctctctgaggaaccctgccaggacttctcgctatgaggacaggctttggccaggtccccagggctcagctcaggaaaaacacaccagtctgtgcccggtgcctgtggagctgggtccatcccagaatcaggggcagcaggtggtgtggccatgggcatgagcagcagctgggctgtggtgtgttggccactgtgttctggcctgttgtgccggtgtttacagtccacatttttaataatctgatgttatgtttggccctgaatcccttctgcagagcctaaccaaggcttgcctccaagatggccttcttgttccttccaactcttgctctgaaatgagctgggaagagagactcagagggagaggggaactgggaggtagcgcgaactccacctgatatttacagagcccctcctgtgtgccaagtgcatttcttatgttaattttttttattattattatttgagacagagtcttgctctgttgtacaggctggagtacaatggcgcaatcttggctcactgaaacctccacccctgcgttcaagcaattctcctgcctcagcttcccaagtagttgcgattacaggcatctgccgccacgcccggctaattttttgtatttgtagtagagacagggtttcaccatgttgggccaggctggtctcgaactcctgacctcaggtgatccacccacctcagcttcctaaagtgctgggattacaggcatgagccaccacgcctagctgcttatgtttgtttgtttacttaaagacagggtctcactttgtcagccaggctggactgcagtagcatgatcataacatactgttaactcgatctcccaggcttaagcaactctccagcctcatcctccggagtagctggaatcacaggcacacgccaccacacctggctaattaaaaatgttttttgtagagatagggtcttactgtgttgcccaggctgttctcgaactttagcctcaagcaatcctcccgtcttagcctcccaaagtgttgggaggtcccatcatatctgggggctatgtggtcactgcaatggccactttccttagcatcctgagtcacctaacccagcctaagtgccgccttcttcttcttcttctccttcttcttctccttctccttctccttctccttcttcttcttcttcctcttcctcctcttcctcttcctcctcctcctcttcctcttcctccttctccccttctttttcttcttctttcttctttttaaatatttattatactttaagttctggggtacatgtgcagaacatgcaggtttgttacataggtatatacatgccacggtggtttgctgcacccatcaacccgtcatctacattaggtatttctcctaatgctacccctcccttaacccctgccccgctcacctaagtgcatttcttatgttagttttagttttattctatcccccacagtaatccaggatgatgtgtttttttctacccactttatggataaaactgaggcccaaagggtaaagctgcctgcctgaggcctcacatccaggcgtggtgagcctggggcctggcctcagacacgtccagctccagagtctgaatgtctctcgtgatgcatgttgagctggaggtgcagctgcgaccatggctcccttgtaaggattcatccactctgcatcttacccctttcccaggggtaccataaagctctctttccagctttggacaagaacagagatgaatggctattctggaagcagaaaagtccaggccttgggctatctcttctctcttatcccatttccatctttagcacagggtgcccaacgccagcctgggtggtggtgtaactcagccatgaaattaaaggcggggcttgcagcccactcgcctgccaaccctgtcggccccgtggcatcaggggtagcaaggccaggcctatctttctaggaaaaggttcagtgtgcagtcaggcctgactaaagccatgcaaggaccgcaatctcaaggcccccagctccatccccttcttgtcttgcttctctctgctgtagtggtgtgaacagtgaaatcatatcccagcaccagcacttactagctgtctgattcggcaaaagtaataatattaacaattgcagcgcattaattgtgtttctgagacatcactgagtacctttcatccttctctgactgaaacctcccagcagccatttgaggtggtaaggtgactgttcccatcttacagatgagggatttgcctgtagttgcacagccagcaagtggcagagggcacactcctaactaccatgtcactcagctttttatgactgcctctgaacctcagttttcttatctgtaaaatgagactgctagtttcaacctcacaaaactagcctggcaatgcaacaacaaaaatgcaggtaaagtgcttaggacagaagagatgcctgaaaaatgtgagttgcctcagtctgttagtcattcgacaaacgtttagtgggatagatgaagtcttgcccccatggagcttccagccaaatggggaagacagttgctaagcaaatcatgacacataattgattggatgattttaaacatgccctgggctggtagggagaagtacagggtcaggtaaagcctagaagtgggtagggaagatgcttgggggaaccggagattagaaagccctggaccccaatggcctaagggagggcttctatctagggcagtgggagaggtcctcagggctgaagacccctggatgcttgaaggtgcagaggaattctctccctgtctgtcccgcagcagctgggaaacccctgggtggtctgattccagcggcccaacctggaactgattgcccgcggtaatattcctgacccaggtaaaaatgtgccagttctgcaggctagtgtcttctgctgggacactggcagcttgctcagcagatggggggacttgtgtctgaggtctatggaggatgaaccacagcctagtctgccttttgtatcccggctgtgtggaaccagcccagccttgccggttgttgagtcaagagcggccgggacttccagttcgaatcccatctctcctgcttcttccttctgagtgagctctagagcctcagtgtatctgctctgtgcaaaggggatcttaacacctactctctggttgttctgaagatttaatagaaggttgaatgtgaagctggaattagttatcagagacttttttaaaatctacagaaagcacattagttgtcaggcacagtgccaagcacttgacacacatcggctcatttaattcatatcaatagttcctgaagaaggtgctggcattatccctgtgttacagacagggaaactaaggctcaagaaaaattcaaaaacttggccaaggtcacgcaactagtgtgtttacaaagggagaataaaacacatcaagaaactgcaaatgggccgggcgtggtggctcatgtctgtaatcccagcactttgggaggccaaggcaggtggatcacttgaagtcaggaatttgagaccagcctggccaacacagtgaaaccccgtttctactaaaaatacaaaaattagcccggtgcagtggtgcgcacctgtaatcccagttactcgggaggctgaggcagaagaatcgcttcaacccgggaggcggaggttgcagtgagtcgagatcgcaccactgcactccagcctgggtgacagagcaagactgtcttaaacaaaacacaaacaagacaaaacaacaacaacaaaagaaactgcaaatgaataaaacccacaactacaatttctcatctacccactaggtaccagacaatttgcgtatgaacctggatctatctgcttgaacagtgacttttctactttggatctagggcctttgtcgggtggtggtagggagtcccgggacaccagcttcatttgaccccggccttgcaatcacaaagaactgtagatgtaggctttcgacagcctcttcgattcagattacacatgctcttaggattgccagatttagcagattcaaaatatgggacatcaggttaaacttaaatgtcagataagcatccaataattttttagtataagtatgtcccaaatgttgcatgatatatatttatatgaaagcattattcactgtttatcttaaaataagtttaactggtcatcctacatttcatctggccaccctatatcctgtcccagaaccaccttgatggaattcatagtaggcgatttcaccttgatgaaatttgtcgtgttatcaaattgtctggactgtagtgctctatgggttggtatctttctttattttttgtttttttgagacagagtctcactctgtcggccaggctggagtgcaacggtgtgatctcggctcactgcaacctctgactcctgggttcaagcaattctcctgcatcagcctcccaagtagctgggattactggtgtctgccactacgccctattttttttgccaccaccaggctattttttttgtatttttagtagagacggggttttaccatgttggtcaggctggtcttgagctcctgaccttaggtgatccatccgcctctgcctcccaaagtgctgggattacaggcgtgagtcatcccacccagcctagactggtatctttaaaaagtcctgaaattaccctggggatatcttacattttatggggattgaaaacctttaatttgttcagagctaatatttaaaacaggctaccgtgttttgtaattttactttgacattttcggttggcaaactgtgggcctacaggccaaatccagtccaaaataaaatatattcattttaaaaaatgaagttttggccaggtgcggtggctcacgcctgtaatcccagcactttggggggccaaggagggtggatcacgagatcagaagttcgagaccagcctgaccaccacggtgaaaccccgtctctactaaaaaacacaaaaattagctaggtgtggtggtgggcgcctgcaatcccagctactcaggaggctgaggcaggagaattgcatgaacctgggaggcagaggttgcagtgagccgagatcgtgccattgcactccagcctgggcaacagagtgagactccgtctcaaaaaaaaaaaaaaaagaagttttattggaacacagctgtactcattcatttacatattgtctctggctacttttgcattacaatgacagagttgggtagtcttacttacaagccccaaatacttactttctggccctttataggaagtttgccagcttctctgatgtgtttccattcattgttgttttcattcatgttgaccagagcttgcacttataatcggtatctaatttacaggtagttcttgcatgtggagtggtggaatggggtctggagtttgggccacactgagatgccatttctctgatcatcatacctgatgcacagtgggtatctgtgggaatgagtcctcccttaccttttttttttaaaaagatatattttatataattaaattgagacagggtctcactatgttgcctaggctggtcttgaactcccgagctcaagcgatcctcccacctgggcctcccaaagtgttggaattacaggcgtgagccaccacacccctcctttatgtttttatcaaattctctctacctttttttcttggagagtcccccagtcacccctcctccctcccgtggaggtctgctctgtaaattcaaagcaggtttttgctgcattttgagcctgtctgctttctacagatttcacctggctaaaaatagtcacatgtataattcctcgattaaagtctttagccgttgggggaggtctgcaccctggtccgggcagccctccatctctctagttgacaaccctgtctgcctgctaactggggtgcagaacttgtggagttcccatccctggggctcggtgttcagctgggtttaatctcagcgctccttggagagggtcagcatgcagattggaaacaggagaagtgcaggttcagacagcggcatctgggaattcacccactgcctgatgctttatacctgcctctcttccccagatccaaggagacggcccagggtcatctcttctgcctgaatagctgagaggagtcctgcaatcttagagccattttcccaagaaacctgacctagaacatactctctcttaagattcaaataaactgttgtcaagaactgtaaaaggtctgagatttttatcctacttgtatacaagttaacaagttagcctgcattgtttcatggatcctggcagaagacacaatattccggggtcagagacaaggacattcttttatatatatacatatatataaaagtatatatatatacatatatataaaagtgtgtgtgtgtgtgtgtgtatatatatatatatatatatatatataaagtttaagttctgggatacatgtgcagaacgtgcaggtttgttacacaggtatacacgtgccatggtggtttgctgcacccattaacccgagagaaggacattcttattcacagtaccgtaggcagcatgagcttcattgacggggatgacgtggaggggtccaggtggaggctgcacatgctgtgtgtttgtgttacagaggagggaccctgagttaggggaaccgaatcctttataatggtcaggaaactgacttgacttttgtcctagggaagactttttctttgttatattggacattagacaaacctatgctttggtctgaagggagatactgtggtgatcttccagggctgttcataacatacaaacaaacttgaagagacaatgcctctgttcccaagatgtgcagaaaatcaagagactcagccaggcatggtggctcatgcctgtaatcccagctactgaggcaggagaatcacttgaacccaggaggcggaggatgcagtgagctgagatcatgccatggcactccagcctgggtgacagagcaagactctgtctcaaaaaaaaggaaagaaaatcaagagactcactgatagttgtctaccaacaactcaatttattttgcttgtttttgtatataaaatgaacagtgttcacaattgtcattaattattgcaggctttatgcttgcaatgatacattaccctttaactacctgataagataaaaaatcccacaacgcaattttcacttcaagttacaattagaattatttcctatgtttaaaagtaaatgttcagggccaggtgcagtggctcatgcctgtaatcccagcactttgggaagccaaggtgggaggatcacttgagcacaggagtttgaggctgcagtgagctacgattgcaccactgccctccagcctgggtgactctaaaaaaaaaaaaaaaattaaaaaccctaaaagtaaatattcagaaattaacaatatgcctgaatggcatgtcttctatgtattgctgacattgttacaatgattggacaccatgggaaacctatatgattacatgaccagttctcacccacagcttaggaatgccagaaatgacagtgacattagcatttgtctattcgctttccaaagcccaggccaaggttgaagtcaaaatagcagattttggctgaatttggaggctgaagtttgggatggttaattttacgtgtaaacttaactgggctaagtattgcccagaaaactggtgaagcattatttctgggtgtgtctggagggtgttctggaaaaaactggcatttgaatcagtagactgagtaaagaagatcaccctccccaatgcgagtgagcatcatccaatctgttgaagttctgaatagaacaacaaagtgaagaagggcgaagactgcctcctctgcttgagctgagacatccatctcttctgcccatggacatcagtgcatctggtacttgggtctttgaacttggaccaggacttacaccagtggtccccctgtttcttgaacctttgacctgagatggggacttacactactgcttctctgcttcccatgcctttgggcttggactggaactacatgaccagctttcctgggtctctggcttgcgacagcagatcatgagacttctccatccctatagtcacatgagccagtccttcataataatctttctatatatctacagatatcttattggctctgtttctctagagagctctgattaatgcaaagttgaatgtctatgtgttttaaattataatagagaatggtattaactactccattcattcagaaagaagtggtatggagagttgaggggggacaaagggctgcaggggttggatcacttaacccagtctctggtgaccctggataagcttcatgagagagatgaaatctaaggttgggccctgaaggaagagtagcagttagctaggtaggggtgaggaagagtgtttcaggctgaaggaccagcgtgtgtgaaggctcagaggagagagagagagagaaagtgatgtctggagagagagggaaagtgatgcctggtgtgttctggaaactgaagaagtttagagtggctgtagcacagcaaacaagcattgtgtggtgtgtgtgttgggggtggaacggagctgagagtggtggaaaatgggttgaaacagaagatagggctcaaggtcatggtgaattgtgcagcctttcacaggacttgggcttcctcctgaatgtggcgagggccatggctgagttttgggtcaggcagggctcagggctgtgctttaaaaaggctgccagaacaggcagtgtgggatggactggaggcactggttgcggctggcgtcttccagaggagggagcagagcaaggagcaacagtggaggttggtgagggtgctctccccagggccccaagaccctttctgctgatggctgagtaacaccagcctttttctgccctcacctcctctgatggtaagggtaaagtaaggggaatgattccacattctcattttcctgcctgcccattggccctgcctcaagttctttccaggccttgccattgctgccacctctgggttaggctagcggaactggtcggctcctgggcagtggcaactggagcttggctatgagctgtgcagtggtgggcgatggggcagtctggcccacttgcccatgcagatcacttttgccctcaggctctgctcacatccaatcctgggagtggcatttcctgccaggcttcctgacattgtgacttggtgggtttgaagaacccagttcgtgatggacagttctgttcccacagtcacttgctgccgtctggtgacgtgcccgtctctaccagggcctggcagcccttcaggggctgttttttaaaatagatgccattccctgctggagatggcatgtccttgcccttgctctggaactctagaagtccatattttaattgtcctactggggcttgcccaaaaaatacaatgtggcatgtttttcctaccatggacactttcttttctttttttttttttttttgagactgagtctcactctgtagctcaggctggagtgcaatggcgtgatctcagctcactgcaacctctgcctcctgggctcaagcaatcctcccacctcagcctcctgagcagctgagataacaggtacacaccaccaagcctggctaattttttttgttttattactagagacagggtttcaccatgttggccaggctggtcttgaactcctgacctcaagtgacccacctgcctctaactcccaaagtgctgggattacaggcgtgagccacaacacactgcccctaccatggacactttctaacagcatagcacagactgggttatatggcccaaaaggcagagctccttgcactgcagcctgggccgcttgcagagccctttcctgctctgagcccaactcaaagttggctgtttccatgtcacttggtaaatggatcagaaagaacacatttccaagtggaaaatatgctacctctggaacccaaagggccttaccaggccttgtgcttccttctccacggtgggagctgtaagatgccataaattgttttttactttagaggggtttgacccagcatgacctggcctctgggctcttgggaacatcactgatatggtaggcccctgaaccttcataaagtttttctctcattctctgtgaagcatgtgtctttccaaggtctccaacatacttgccacttcttgtttatttggtctaattaacatgctatagcctttttttttttttttttttagacagaatctcactctgtcacccaggctggagtgcaatggtgagatttcggctcactgcaaccttcacctcccgggttcaagcgattatcctgcctcagcttcccaagtatgctgtagcttttcaatatcatgggctattgtggtattttgcacgatgtctacattgcccacatcttttcgtagtgcattatgacagaggttaggggaattaccatagtcctggagaaagattgttatccatcctctgtgaatataaactctttttggtcctgtttcctaatagggatagaaatgaatgcatctgccaacccagtggccacatgcccagtgcctgtcatggtgctaatttgctctagccaaaagaccatatccaacatggcagctgcaactggagctacgtggttaagtttgtggtggtcccctagcattgtctttagcaggtctgccaattctctggctgggtcatgttgtgattaaccctagttattggtctggcagccaggaagaagatgagggtagattctgaatgaggtagatcctgtctttcaaagtagaggcctctgtgtcatcttcagataagagggaaatgccagccttgaacagggagttcaggtgagccatgtctgcacactcatagggttcagggaaattcaggaattcaagagttttcagtgcctccatccagatggtcccacatccatcttctgagttccgctccatccaagcaggaccatgactctggcatagccaacttgttggggttgagaattcaacctctgaagctcatttttcatgaactctggacctgatgctcaggagatgggaatctcttcttatgtcaccaaggagaacatctggctttcacacttcaccttcgattagtaattaaacactggcagccctttattgtctttatccactgtattgatgacacttggcaacagtcatttgattccattatcattgtaaagatattttccccaacctctgaaacatctgaggctttgcatctgtgtgacattcccttctacctgcatcccatcataattcctggttggtaaagttttaagaattgtaccactgcagcagggcaggggagtcctctgagcgggtgaggaaagcaggacgaggtggagggagacgttgaactgctacgcagtggagacaaagtccttggccaattccatgagcgtttccagagctgggatggcacttccaggttgtttgaatggaagcaaggagaccagtcactggacgcgggctgcccctgcggaggggtgtagccttgaaggaggcagctcaccttagctgaaggcaattcctggaaacaactctgctatgtgccatcatcaggtaatactccaggcagctgggaaatgagtgctttggtcttgaagaaaaatcttaggaaaattaagtgcaattgaaaaaattatgtcatttcccaggcaattcataaaatcattgttggtcacattttccctagtcatctaagtgtcatctgacccccttagcatcccttaaacattttgcaaagggcaatgcatacgcttcatttcaaacagctttactagagtgcattgatactatacttgcacctcattcagtactcactctcattcacacaaccttttgaggcagttgggattatcacgatcccagtttttatttttttttgagatgctgtttcactcttgttgcccaggctggagcgcaatggcacgatctcagctcaccacaacctccgcctcccaggttcaagcaattctcctgcctcagcctccataatagctgggattccaggcatgtgccaccacgcccggctaattttgtatttttagtacagatggggtttctccatgtgggtcaggctggtctcgaactcccgacctcaggagatccacccgcctcggcctcccaaagcgctgagattacaggcgtgagccaccgcacctggcccatgatcccagttgtataggtgaggaaactgaggtgcagagagatgaagttggtggggcatgctcaagtacattcttcaggtctctgatgctaaattgtgcttttccttttagccccagagttccctccagaggcaaagcagggattctcaacacagtttgctaatgaagaaaccaagatacagacaggggcagagggggctagcagtggaaggggaaaccagggcattgttgggtttggaacaagggctctgactcgaggccggagccatgtctctcagtgttgggtccctgaacgggcttgcgaggccctgaaagtaacagtacggtgggctgggaggccagtggccccagagtcaggaggtcatcaccctgccctgccctgacctcagtttctcacaccaaccaaggggtcacgggggaagggactttatggccgacgggatttatggcagagacaacagtttgttctctgagctgccctgctctggcctgagccacccagggagcagtttaacacacaccctgcagccccaaatggggtttccagctggagctctggggcccaccccttagctggagcctgagatgacccctttgcccatctgtgcaagacaggaacttatggggctcgcctgctcctgtgaaccctccatgagccccggagaaagagggagcagcttagagggccctccctgctccccctacacaagctcgtttatggccctgaggcccctcaattccaataggattgtcaactatgctttcctactaactgaagactaccctcagttctctattccttaaactccagccgctcatgtcccccacctgctgaatgtctccctagggatcccacaggaactgccaaccccgcatgcccactgctgcggggcatgcgcagtgaactgcccactgcttccccttctcctcccttgttctcgggcaatggtatctccacttatccattctctcaagccagacacaggagtcttccttgaccccatcatcttctttctgtcattacgtcctgccagtgccactttaacaatgccacccacatctatagacctctttccatttccatcacacctaccttgttccaaatggccttcacttctagaaacattaatcagaacatatatcattccctgggttaaaccacttcagtttctcctcattgcccagagctgtgcttctcaaactggatgcctgatagcatcggagggagtacacaatgtcacaagtagatatgaggaatctccctaagtgccaatattacttgagaattttgaggaaaagccaacttttttttttttttttttttgagatgcagtttcactcctgttgcccaggctggagtgcaatggcgcaatctcggctcactgcagtctcccgggttcaggtgattctcctgcctcagcctcccgagtaactgggataataggcatgtgccaccacactaggctaattttttgtatttttagtagagacagggtcaggatggtcttgaactcccgacctcaggtgatctgcccaccttggcctcccaaagtgctgggattaaaggcgtgagccagcgaacatttttatattgaaacaaatgtaatattctatgaagccatataaaagtcctctaaaagttatcatgtaaataatacaaaaacactcaagattgataaagtttgtattgtgaatttaaacattctggtttgtaatgatgataaacatttaaactttgaacttttttttttttgagacagagtcttgctcttgtcaaccaggctggagtgtaatggcgcgatcttggctcactgcaacctccgcctcccaggtttaagcaattctcctgcctcagcctcccgagtagctgggattacagatgcgcgccaccataaccagttaatttttctgtttttagtacagacggggtttcaccatgttggctaggctggtctcgaactcctgacatcgtgatctgcctgccttggcctcccaaagtgctaggattacaggtgtgagccaccgcacccggccaactttgagccgtttgttaactcatgtttttagaattgcaaattagcttaccattcaccattgctattgccatcggttttgtacagaacattcttggtgatcatggtatctcccttgccaggtaagtataacgttcttaggcacaagggactaaatgcagcttttatatacagaggatctttataaaacctgaacttgaagatgcatttcaatcttgcataaagtgtttatgttgggcatttacgtaacctaattaaacaatttttttttgagacaggatctcactctgttgtccaggctggggtgcagtggtgtgatcatggctcactgtagccttgacctcccgggctcaatcagtcttcccatctcagcccctctagtagctgggactacaggtacacaccaccacacccagttattattattattattattgttatttgtattttttgtagagatggggttttgccatgttgcccaggctggtctcgaactcctgggctcaaatgatctaccttcctcagcctcccagagtgttgggatttacaggtgtaagacactgcacctgacctaaatttttatttaaccaaaaaaaaaaaaaaaaaaaaaaaaaccagaatcaataggatgtgggtatagatatatagacgcagacagatttattttaaggaattggcttatgtgattgtcggggctggcaagtctaaaatctgcagggcagactgacaggctggagacgcatggaagagttgatgctacaactggagcctaaagaccgtctggaaaatttcttctttcttggggaaactcagtcattttttccttaaggccttaaactgattagatctggcccactcacattatggagggtcatctattttactcttagtttaccgatctaaatgttaaatttttctaacaaatactttcacagcagcatccagactggcatttgaccaaaaatctggatagtgccgtttcatcaagctgacacatgaaattatctatcccagcctgtatgtctttgtatacatggaatgtgggtagctggatagctgaatggagggatgaacggataaatggataactggatatgtggatgggatgatggagatatatgattggttatgtgtttagaggccagatgaatgaatgaatgaatgagtaaatgaataggtagatgaatcatagaatgattggtggtgtgagtaggtgggtgggcagataggtagagaggtgaatatatgtattggtgagtgactggttgagtagtaaatgtgtgggtggacgggatggtaagggttgaatgttggttggatagctggatgttgtctagtaagacctgtggttggatgaagtgctgatggacgcacatatgcatggaccagtggatggctgtgtgactggtggagtctgagtaatgagtaaatgaggggaccggtggataattgaaagactaagtgtgttagatgtaggcaggaatggatgagagggtgggtgaacaagtagatgggtgtgtgaatagatatattgggaatctatagatctctttgggagaatgctaaatggggaaatgctaaagtcagcaagtttgttttatggaagagttagtagaaaagaagcaacatttcatgtaccctttatatgattgatacaagtgccttcatttctctgagcctccatttcttcatctaaaaataaaagggaaatcaaatactatttacctggcagcgtgctgtgaggctcaagtgaggtatgtgtgcaagtgtctggcacagtgcattaaatattattaagttctcaaaaatgtcggttttctgcattcctctgcctctcctctccttcttccttgtctgtaggtggaaggttatgttttatagagcgaaatcataccgaggtctcctctgtgtccgccaccccagctttaatagaaacacatccctgacatggctggtacaacctcctggggcctacattgggcatagaatagccccctccaccaccctcaccccaaaagggacaccactgcctgaccctcttgcttcagctgggatgatttctttgtcctcaatggatcagagacaacacctggcctggctactgcttctccttgaatctcctcatgacaactcaaacatgatgagaaacacatttggactccttggtggcagcaacactttctccctgaaagatcagagacatgtacaaggccacacacacacacagacacacacacacacacacgcacacgaggtttgtacaggggaccttggtggggaggaagtttgtggcatagcttaggagtctgagaaacgggtttgaatcctggttctgccattttggggctgtatgattctggagatgtctctctccttttctgagactcagtgctcctatctgtgaaatgggaataatatggcccacctcacaaggcctttgttaggaagaattgaaataattatggacacagtgtctggtacataccaggtactaaataaataccaatcccattttcgctggaagaaaagcttgtctaggaaagaaagacccaaaatgtgtcacttcggtttccacccaagtatttggagccctggtgggagtagtgagaaggagtgggatgttgagtaagttgatggatttatttattcaccaacttatttcttttttaaaaaatcagcttaactgaggtatgattctataccataaattgcatccgcttaaaatgaacaatttgatgagtttgaacagctgcatgtgtctacccatgaaaccattgccacaatcaagacacagaccattcccaactccccaaagattttttgtgccctttcacagtccatccctccctccagtgccatgcccgggtaaccaccctgctttctgtcactatggatttgtttgcattttctggaattttacatcaatggaatcatatattataacatcttctgtgtctggccccttttttacttggctgaatcatttgggatttatccatgttgttgcatgcatgagtaatccattcctttgtattgctaactagtattccgtgtacacaactttttatttcccactcatgtagcttttaattaatttattcacccattattcagctacttgcttgttcatgatttacaattgtgttcatttattcattctttcattcatccattccacaaatatttactgtgtgccatctctgtgccagatattgctttggtataggaccatagcatgcatacatacatatatatatatatatatatatatatatatatatatatatatctttattaaaggtgctggggataaggcagtaaacaaagtaaagaagttccagcatggaaggagattatattctattagatataagcaagtaaatacatgacaagttgtgataaatgacatgaagtgagagaaagcagatttgggggtggatgatgtttatggaagtgtgctactttatatataaagtggcgagagagggtgtcttggagcagctctgctgatgaatgtacagaaagagaaagtgcaaagatctggatgtaggtaggtgttgaggatcttgatgtaggtgggtgttgaggatattcaaagagcagcaagtctggaagaggtctgcatcgaagatataaatttgggagtagtgggtgtgcaaagggtatatttaaagaagaaagactgatgagatccgtctccaagggagttggtgtatggacaagtccacatctgagggcagagccctgaggccctcctacatttatggggcaacaggatggagagcaaccaaccaggcagctggaaaagagtggccggagggtaggaggtgaataggcagagtagggtctgggagctacgcatgaagcaggtttcaagaaggagggaggggtcatctgtgtcaaatggatgctgctggtagattgaggaggacgagggctacaaactgaccaggggagctgacggctagaggtcttggggttacagaaacgtggtagtgatgggaagggggtagttggagtgggttcgagacaatgggaagagaggaagtggagagagtgaacacagactattttgaggcgtttgactgcaaggggagaaggcaagtggggtgatcgggatgtgggggtaaaggaggttttaacatgggaactagttgccatactttcatactactgagattgattcaacatttactcaaggtttctcttttcaagaatggtgctttttattcattcttatttctcatccatttcaatgcttttgtccttccccttgctgttcagaaactgttttctctagagggagatccatattgagtggatccctaggactaggccaaaaaggaggaggaactgggcaaggggagacatcattttcattttttttttttgagaccgagtctcgctctgttgcccaggctggagtgcagtggcgcggtctcaactcactgcaacctctgcctcctgggttcaagcaattcccttgcctcagcctcccgagtagctgggattacaggtgcctgccaccatgcctggctaatttttgtgttttcagtagagacgtggtttcaccatgttggccaggctggtcttgaactcctgaccttgtgatctgcctgccttggcctcccaaagtgctgggatcacaggtgtgagccaccatgcccggggagacattttcacctgtctgggtggcccaccctccctcacctcggaaagggctagacaaaggaggcctgagtcctcttcagctcctggctgatggggcaaagcgtcatctcagcttctccctctgctgagagaggcgaggaggcccgagagaggggaaggggccaggcaggagtggtgcctgtcagtggtgacttggccactcctgaatgaagtgagcctggcccctgccctgaggtcccctccctgtctgctggcctccagctggcccctcctcagccccatttccaccagcctgtggtccttgcggactgggagggctgggaccagcagccaggagcttctttctttcctttggaggttgcttgggagggcgagtatggagtctgacagatgtgggtatgaatctggttccacaacaattcaagggaagactggggtggccaacttgtccctctttttctgggactttcttaggtttagcatggaaagtctcacatcctgggaaactcctcagtcctagggaaaccggattgggggtcgccctagaaaaacagtggatgaacctgacagaaggcaaggactgtgacttcttcaggcttctgcaaggtgatctggcagggtgggtgtgggcccaggcagcagtccttgcttccccactgcctagctgtgaggcctgggtaactgaacttctctgcatctcagtgtccccatccatagagtggagaaaataacatctcctatctttcagggttgttgtgaagattatatataaagcattgaaaactgcctggttcataataagtactcgatagacattagcatttagctattatttgtaacctcagtgcccataataggtacctaggtactcagcacatgtttgtttgtttgatgaaactgtgaatgactgagtggctctggtaagaggatatgtaagatgttaaggttagcccgaggaaagagacactgattctgttcagtgggaatcagaggcagctccatagagaggctaataatcaggctaggtgttacaggttaagtaggagttttctagttagagctgggacagggactagctcgtgcttgagagggaataggcagagaggtatgagagtgaataggtgcatggcttccctctcaccccaagcgcaatctcagcaactcagttatcaaagaaaccaactctctcagggttacttttcctacacccatgattgtaaacacctctcagcccccgtcctgtctatgttttcaattctgtatcccagcatccagcttggtgcctaatacatagcagaggctaagtaactacttgcggctcatctgctgtgtgcctgctgctgtgctatgtgctttcttgtattatcttattttactctttactatcaccatcttcctttttttttttttttttttgagatggattctcactccgtcaccaggctggagtgcagtggcgccatctcagctcactgcaattctccgcctcccgggtccaagcgattctcctgcctcagcctcctgagtagctgggactacaggcacgcaccaccatgcccagctaatttttgtatttttggtagagacggagtttttccatgttggccaggatggtctcgatctcctgacctcgcgatccgcccacctaggcctcccaaagtgctgggattacaggtgtgagccaccgcccccagccaccatgttccattttaaaaatgagaaaattgaggtacaaaataaatgacttactcaagcaagccccaagagtcagtaagagaaagagctggcatttcataccagcaagtctgactccagattaagcttctaaccattcccttacatgtttctttagttcttggcaaatggtacctctggctacagttccaagaacaggaggaggttggttgaagtctctagggcctccacgtcttctggggtgggaggtaacccagtaaaactcgactcaatagatggatcatgggctcctgcctcacgaggtgaggcctcatctgtgaggtcagggcatagactgtggagctcaggtcttggctccatgcttcctagtggtgtgatgctggccaagttactgctcctctccagcctcagtttcccttcctctaaaagggcttcgatgggattgttggcagaattgcatgagtgacctcatatcctcatataaagcactgagcagagcccagcaagaggtgcgctctcagtttctgttagctgctgttagaactgactttctcactacagggtcttgtgtggctttcagactgtggggatacagagtggcataacacgtagccctgccttggaggggctctggacacagtgggacagggcgacatagagagtttggtaggggcggctgggctgggacctgcctttgggagtcattggcacacgggctttatttaagtgcacaggggcgggagatcacacttggagcaggagagcagagaggggagaaaagttgctgaagaccaagctctgggaaagcaacagggatagagaaggtggcaccccacataggataacgagcagcctctccgtcctgggcaagctgggaccttggtcaccctggctccaagggagactggaggagtagccagaggcaggagaaaaccgggaaggggaggagaagctttgaagaaggagggagcggtaacctccaatgctgctgggaggccacggatgccggagcagacatgcggccccagttttggtggcgaggctgtcattggcagcctcctggagtatgcggctgcaagtgtgactgaagtcagttgaagaatggaagggagatgaggagagatgaggagagagtgacaattctgagaaatttgcttgagaagcggaatgaagtccagaacatttttcttgtcttaagatgggagagactggtacattaaaaaatgctgatgatggctagtcgaggtgactcatgcctgtaattctagcactttgggaggccagggtaggtggatcacttgagaacaggagttcaagaccagcctggccaacatagtgaaaccccatctctactaaaaatacaaaaattagctgggtgtggtggcgggtgcctgtagtcccagctactcaggaggctaaggtggaggatgacttgagcccaggaggtggaggttgcaatgagctcagatcacaccattgcacttgagcctgggtggcagagagagaccctgcctcaggaaaaaaaaaatgctgaaaaaaaaggcaccctgcagagaacgaggaaatggagattcaggagaaaatgcattggtgagagcaagatggacgaagagatggagtcaggaacccagggccggggatggcggctgggccaccatctccatggtgaggggagacaaggggagagtcacggggcagggagatgagctggggagatccgaggacgcccatctgaaggcctccattttctttatgaagatcaagacaagacaagaccacttcctgagggtcgggaggagtttgctgaggctgaggttgagggtgggtcgaggagaggaaaggaacgatgcggcggccgtggtggagagagggaaaggaagccggctggggcccagggagaggctgccagcgatgcggatcacccagtgcgggccagggactgggagcacagaggccagctgcccctcagggtgagtgtctctggcccagctcagctgttcaggcacaggagcaggggtgtgggttggagggtcacccaggcttgcagctcaggcaggtgggggtggcggaggcagagagggcagacagggatgaccgtgctggccgtggaatctgggctgcagccatggggtggaaactctcagaggcagagagagatgtgtttgagaacagtctggggacggagcgggcagtacaggagctcccgagccccagagacagagagagggctgccggtgaagaaggtactgattgggtccttgatggtggaagtggtgcagtttctgtgatgactagtcctgatggctgattcggggtggaggaggggcactggtgacgaggaagtccaagacagaggggccaggacattgagagggatgtctgtgagggtgtcaaagcgacccagggcaatggcaagagatgcagttggggggctcctcagggagtgaagagtgcccaagaggctgtggacaagtgaggggggtgagatgttgcaaacagcctgtgtcctgagagagcaggtgtttttgggaaggtgtgggcagcataggccagaaagtggccatggaagcaaggggacaccgcctctgtctcctgtcctgaggtgagagaggaaagccagccttctcttgggagggaggggaggaaatgatgtccccaaggcagagggggctccccaaggccatggaagggaggagctgggaagaggaggaagctgtgtgcgaggcagtgtgctgtttgtggggctggggttcttcagggtcctgggagaaggttctggaaggagggaaggctggaagctgggccaggggagagactgtgcagaaagcatgaggataggagcttgtagaactgtgtatgaggggatggacccccttacagggatgtgaggccttgtcctgtgtccttcctgtggacacttgagtccaacaggattcagctgaagctgagaagtgtgagaaggacctacggggtggggggaaggtgcttatcttgcttcccaaggagcaatggagggggctttttgccacctcctggggtgggagcctcagtcctcggggctgggccccctaaggcccgtcccagctggtcctgggagggtaccacctcctccccaccctgtgacccctgggtcaggggccatctcctggggagatgggagtttgtggctggcctgagcagctgcctggaggggaggaggccccttcgatgaccaaccagctctttcacaccccaaggaaaaacaagcccatctgcaaaaacccagaggtgtgaggtggaggcttggcaatctgcggctgggagggaggagcctcctgtcttcccgctgagacagtgtgggaaggccggccagcccagcctgggatccagctccctccctccatggggccttgggcagggcctccggagagcagtgtggggctgggaaggactcggaagcacctggaggagcaggaagctctggggacactttgcaactcaggcggctggcagagaatgagcactgtgcagcgagtcgggagatctcagccacccacacccccagactcctgcgtgccctggggctgttgaggggtccccacttcagggttcagtttcccctgccatccaactgctggagtcggtggcctgggatgctctttctggctggtgaggctgttgaggtcctcccaatatgggcagaagaacccaagcagagggtctgagcgcctgcccgctctgggcacccggagccggctcaagttccattcctgaatatcaatgagcaggcctaggaatgtctgccccacagctggctgcaggcaggcgggcggggcgggaagggaagggaggaaatggccgggcctggccctcccagacccacctgccccgcaacagcaggcagagcttgcaggcaggcagggcagcctctgcccagggcagaggcagatgggaacagacaaaggcccttgagatgtgggggaggtatgagggagggcaatggggggagggtgggacagacctttcccaagctgcagtcatgccccgtgcctctgtgccatcgcacctttaagtctccagcaagctccagcattctgcactgtcactcctggaacttgcccaccttctcactgtgggaggaggcagaactaagattcaaccccaggcctcttcagcttgcaacctgtgacatttgtgttatgtcaccctaggagatagggaaagctgcagatgtagacagcttaggggctgctgggctgagagctgcctttattcatttcttcctcttgcaagaaacaaggcctgtgccagcctggtgtcgggtgctgggaatacatctgtgagcaggccagggaggttttaggaactggagagaaaagagtaacattaatgctcccttaatcatcctcagcccctagtgagtcatctgaaaaagctgctaaagggctgcattcctctgcagtacagaggattcacccaagttagtaagaacatttcagaacaaatcacatctcagaacagagctcggtgattgcaggagaggtcaagccttcagagagtcaggacatcagggacagacccttaaatgtgccaggtgctgggattgaccagtgaggggatgggtaacaagattatttgacaaggtttcttctgcacgtaactcacagtccagggcaggagacaactccatcacaaggccatgatggaacagaatgctgggatggagaagtgggaggagccaggtaggaggaaagttcaagggtggggcctccaaggtggcattacaggaggagtgagaattctacaagggataaagcaggaacgtgcctccaggcagaaaggacagatagcatttgcaaaggtcttgcagtggctatagccctgctggaaggccaacagtgtaaagctaggagatgaactgaaacgcagagaggtgtgctctgaataccaggctgagagtatggacaaccagtgtgacactttgcttgaccggatgaatattccaccctcctccctggcctagaaaaccattttggatgtgtgtttgattgggtctgataagctgtcagggctgccggtgaagctggaggctgtctcgaggctgatcagcttgcccctccacaggcacaaggactgtgtctgggccccaagcactccgtctgcaaagaaggagctataaaaatgtactcaaggcaaaggatcccagggagctagcacaaaatggtgtttgaggctctttccatgcagatcaagctcaaccccaggaaccaaggctgactgaccttgacaagtcccttcccctctctgtgcctccatttccctgcggtctcaggttactctccaacattctcattcagatgactcaaggagaggtagaattgggtgaccacttagaaggtggctggagaactcactggattagccatgatcatcatttctgaccccggcccctctatggggtgacgaggatgggagacagaattgtgagggctgcttgcaatggtttcattgtggggccagctcctggggagtctgtattccttgaagctggcgtctgggcatccacgggttttagaccctggtctaggcctcggatggtgagtagagccagaattgggaccttggttctttttatttttttgagataagttcttgctctgtcgtcacccaagatagtgtgcagtggcaggatcgaagctcgctgcagcctcaaactctcaaactcctgggcttaagcgatcttcctgcctctgcctctggagtagctgggactatagctgcaagtccctatgcctggctaattttttaaaagattattttgtagagacaagatctcgctatgttgcccaggctggccttggactcctggcctcaagcattcctcctgctttggcctctcaaagtgttaggattacagatgtgagccactgtgctcagttgggactttggtttttgatatggatcaagattcatatgtcagctctggatctattcattcatttatccatccaaccattcatccatccatccatccatccatccatccatccatccatccatccattcatctatgcaatgactaattgttgagcgcaggtgcatgctagctgtgtggtcaatagcggatgttgaaggtgcatcagaaagcatggtacacatgttaatgggatctcactttagcagtgggtccattccattcagcacttaaggaactcccctacttcctttgtgtgcccagggagaccatttcattcctgtgagcctcagtgttctcacctatacaatgagatttaatgatccccgtttgtaatgctgttgtgagtttaatgagatgatggatggagggcacccagcatggcacaaggactttgcatgggagctgtcatcagtgttccttacagcatcacacccgagcctacagctcacatggcacagtggtaggaccagctgtggggagtggaagaaggagggcaatggggttaggcagagctggctacactttggctgtgtgacaacaggccagcccctcaacttttcagaatccacatttgtatatcagcgataataattcctcttttgcggggaggaggcatacactggaagctggcctccttccttcccttctccgagggggtgggttggggacatcatgacccccaagggctgtcaatgggagatgcaagagacatgtccagtgggcctgggggccctttcgttcatctacatgtcattgggaaagtcttatgcaaggtgcttgggattgatgattgacatgacagatgggaaacctgctctcatggagccctgtgcctgggatggcagaggagtgaagaccagatgcacggagcggtttgtgatagctgctctgcgggagagcgccaggagctgggatcacaggtcaggaggggctgctggagatggggaatccagggagcgtcttgaaggaggtggcttttgagttctgagctgaagtgccaggagtcagctgtttgaaaggtgggcagaggtgggcagggcacagcaagtgcaaaggctctgggatggcaaaggctttgagagcctgagaaagcagaggccatgctttcagggactttcacgtgtgatgggaagcatgtaagagattctctcggggagtcaggcaggggccagagcagacagacagcctcattcatgtgggtgctgacgactcccttttcgcagtcgaggaaactgagggctcagaagagttaaaccacctgcccaagggcaagttggcaagagatgaagctcaggtgggcctcccatgtcagatcctgtcgggaggccaggggcaaagcccccaggtgctctaaggtccccctatcctcgtgaggggtgagaacaggagaggcccagcctgggagagagaacactgtgtttgtgagagagagtcagaagaggcagcagcctaaacgcacggcagaccccggccagccctggctgccagcacaactgcttgtgcggctgccaagcagccagatgccgcttctggaaaaaatatcttcctggcttggcactctctggccggccggcctgccatgcaacgggaggagggggctgccgagtgtgggccgctgtttagcaccccagaacggcgctgctgtgcctttgaagccaggcaggaacagggaagggagggggcagggaggatgcaagcaaaatattttcgctaaaaatattctggtccaggagaagatctttttttctttttttcccctactcttgctggaaaaccaaagtcttattaaaacaacaccagaatatttcatgttgatatcaattaggcgaaggagaaggaatcttgaattttcctccctgccagtttcacataaaaggaatattctcccagaggccaaaggatgaaggtttttagttttttccctttctgcaaaaaattcctgcaatgtggacggaaagttcctcatgtctgagagcttcctgagaagttggggctctggagcttgaagccaagttctccccctaagcctggaggggcagggcaggtggctggctctttcacaaggccctctgaacctgtcagggagggacgtggccaggcccactctgcgtgaggctggcccatcctgtgtactctagaaggcctcaagccagctgggccgcttagccaatggccagagatcagcagatatagacagagcatttggcctctgcctctggcacccctcatcaaagcttcttaggcagcgtcaagacaggagttgctttgaggtgtctggctgaggcccctgtctctggtagagtcctttcctagccatgatggcagcaccattgcctcacacttactatgtgccaggcacttacaaatatatgttaatatctcatctactcctcacaacgaccacaagaaaaaaggattatatgattcccccatgcccctgagaaaaccagggcttagagtcacacaactagaaacctgcactgacaagatttgaacccaggcccctcaaccctaaagtctgtgttctgtcttctattccaacctgcccctcatatgacccattagctcagagtttggtctcctgtggagaatttggtaagtaagggaagcttttctgtcctggctatcatcttaaccctccagctctaaatcagagctcctaaaaaccaccccttcggcaatgttttctctcccttttctcctttgctaagctttcagaatgtcccttaaacattatttatttatttatttatttattgaaccattcatttatccatccatctgtccatctgtccatccatccattcatccacccacccacctacccatccatccacccatccatccatccatccatccacccatccatccatccatctatccattcttctacctacatccacctatccattcatccatccactcatccattcacccacccatcccatgtttactaactgccaggcatcagaggtgtagaaatgactagaacacagctcctgctgaggcctcattcaggttcatcaaatattggaggtggaatgtaatattagaaagtgtctaatgccaccccctcagatgtaatctaggtgggaggaagtatcttattttacaggtgaggaaactgcaggccaggaaaagcaatgagacttgctgggaagttgtgctttgtaattgaaagattgagaatcctgaagctcaaacagacttctaggtccagtttgcttccttcctagctgagggacttgtgcaagtcactgaaactctgtaaaggaaggagagagacatgaggtcaaagagggctcaaggccatgtacggctttgtaggccattgtgaagagctctggcatctactctgagtaaaaacggtgctatcacagggctttgagcagagaagacatgatccaactgtggttttaaaatgattactccggaggctgggagcagtggctcacacctgtaatcccagcactttgggaggccgaggcgggtggatcacctgaggtcaggagttcgagatcagcctgaccaacatggtaaaaccccctttctattaaaaatgcaaaaattagttgagtgtggttgtgcccacctgtaatcccagctacttgggaggctgaggcaggagaatcacttgaacccaggaagtggatgttgcagtgagccgagatggcgccactacactccagcctgggcaacagagcaagactctgcctgaaaaacaaacaaacaaacaaaacaaaatgatcactccaggtcttgtgtagaaaatagcccgtcaggaggtaagtgtccaagcaggatgatgacccattaggaagctattgcaaccatccaggcaagagataatgtcggtttggaccagggtaatagtagtggaggtggcaagaaccatcagtattccatgtgaggtgaaggaggaagagagacatcaaggatgattttgtttttatgcctgcacaactggaaagattgccatcacctgagagggaaggctgtgggtggaggtggttttgttggggggaacaaatatgagaagctccttttggatatgttgagcctaaggcacccattagatctttaagcagtgacaccatgaagacagctcaatatccagtctggggtcaggagcaggtctgggctggaggcatcaatctggtataggaatggcgtctacaaccttcagactggatgagatcacaaagtgagcgagtgtagacagcgaagagaagaggtccaaggactgagcccaggaccttccatcacttagagattttcctaatatatactgagccctcagggtacagatagaagaaaacgtggttgttgccttcacagagtgtgtgttttaaaaagggcagtacgtggaaggaaccagcaagttcaccaggccaacaagctgtagaaaggggtcagccccacgactgtgggagcccagggtggcatctcatccagcccagggaacccattaacgtggcctgttacagttccactctgacagatgttgtcctacctggggctcccagtggctgctagcaacccctgaacctactctgttccatagaatggggaagagaggactcacttggcccaaactcggaatttgggagctcatctcattctctccgtagccctgtcagatcaatactgttaacatcctcattttagagatgagaaaactgaggctagaagtgggaagccactggtctcccgcctgactttaaagatcatgcactcaacatgggaaaaaagagggtgcaaaaggttgctgagaaagggaactcagaatcttttttttttttttttttgagatggagttttgctcttgtcacccagacttgccacccagtggcgccatcttggctcactgcaacctctgcctcccaggttcaagagatgctcctgcctcagcctcccaagtagctgggactacaggcatctgccgccacaccgggttaatttttgtatttttagtagagatggggtttcatcatgttggttaggctggtctcaaactcctgacctaggtgatctgcctgccttggcctccgaaagttctgggattacaggcgtgagtcactgcacctgggccagaatctttactttagggtatagggttgtctcctgggagggagctcctgggcctgtcagtcaaagtcaatgccttccgagaccaggcaggggacatcagtgaggcacgtgggctgcggagcagagtgtacagcttcatctaagggaaagccactcctcagcccggccaattgtggccctacggaaatgtgggcctagggttgacagatctggtttctaaagagaagccggaaacctggatttttatgtgaaatttcccactttttagaacagtgtcaggtccaaacaaaacacatgtgcttgctgagttgacctcatggccaccagctccagactttggccttttggatggtgtttaaaagcaagcaaggatcacacatgccgggttcaaatcctgcatccctcccaactggctgtgtgttcttgggcaagtgagttcacctccctatcagtcatcctgtgcctcagagctatacaagaaccacggggcacagggcccctcacagatgctggataaatggtggtgaggaggtggtctctgtgtgtgtgtgttgggtgggggggctgtggtgtgcacggctttgggtgggtcggagatttttattgccttcacattcctgtcccggcctttcctcatggctcctgagagctatggagcccatgtgtgggatcggtcacacgcctgaactctaggagagcccttccctcgctcaccctcttccaagccttccccgagggctccttacggctctcctgagcagcaagacctccagcccggagccttcctcgccagcctggctccccactcctgccactcctctgcagcacaggagagccgtggggacgtgtggattcctgaggggatgttttccacatttctggaaacccactgcggtttggttttccgtggtaaagggcttggcagtggctcagcccagtggaacggctggtggctgggaagggcccgagtcagaggtattcattgagcacccactgtgtaccaggcccctgagattcacagatgcttaaaacagtcctgggccctccaagaacttcattatctcagtatgaattcagacttgaaatccgagaagttaaaaacatctcaaaaccacgtccttgccactcaggccagaagcctgccttcctctggcttcctcctcatcccagcagacactgggttcatcctgctgtatcctctaaatctcttgggcccgctcatttctctccacctcgttgccaaggctttggtggatcgtcatcctccctcccctaatgatgacagctgcctccgccctggactccctgcctccagccaaccctccttcaatccctccccatggcccctgaaaagtctttctaaaagccaaatctgatcatgtaatgtccataccaagagccctcagtgacctcaaggtagagtctaaactccccatattggcccacagaccttgcaggacctgccctctccttcctgccttcaacagctttatctctgcccccatttctcggagcgctctgtactttagagggccttctcggagttaactgtacagatgcattctgctttctgtccactctgggcctttgcacacacagtcttctcttcctagaatactttcccaccatcacattcaccaagtgaattctactgatttttcaggtctttgcttaaatgttacttcttccaggaagtcttccctactcatccccatctccaggctggataaggtaactttgctctgtatccccagtgctttgcttatgttactactgattaactactaacaacagtactataactactaaaaatactgctaacaatagtactaatgctaatcttaaagctagtactaagtttatttattttttaatttaattaaattttttttttttggagatggagtctcgctttgttgctcaggctggagtgcagtggtgcgatcttggctcactgcaacctccacctcccaggttcaaacaattctcccacctcagcctcctgagtagctgggcttacaggcatgcaccaccactccctgctaattttttttgtattttttagtagagacaggattttaccatgttgaccagcctggtctcaaactcctgacctgaagtgatctgcccgccttggcctcccaaagtgctgggattacaggcatgagccacagtgcctgtccttaaggctagtactaagtttaatgtcaatactaacactaatacaaatattagtgaacactaatgctcatagcaagtgcttccataatgtccgcatgtgccaagcactgttctaagcactcaatacatattagttccctttagcctctcaatgccctctgaggtgggaactattattgtccgcccttcacaggtgaggtatagagaggtggcatcgcgtgtccaaggtcacatggatagtaaatggtaaagctgggatttgttatccttcacatatcagttggtcttgcaaagacctattttcctggtctgtttctgtccctgtcctaaactctgggacagcaaggcccagtgctgccttgtctgtgggtacatctccagcacccagcacagtgcttggcatagagtaggtgctcaataaatgcctgatgattgaaggaagccatggtagatgtactggagaactcaagacctgcctgagtgcagagttggatcaaataacccatgttggacccttgctacttggggtctagcattcagggtgcaaactttatctaaaagcaattcatcaagggaaagtagacaagaatacatgtaacctctacacttttaacacttgctatcttattattgattcattaggataataatgaagcacttgcccagctccagcagagaggagctgcttaattaatagagaagtggggtcagatgtggtggctcacacctgtcatcccagtgcttcaagaggccaaggtgagaggatagcttgagcccaggagtccaaggctgcagtgagctacgattgcaccactgcactccagcctgggctacagagtgagaccctgtctctaaagaaaaataaaatacaaattaataaaaagagaagtcgtaatgagcagagactcctggttatgacctaggaaggtggcatgcctattttacagatgaggagactgagcctgtgggaaaggaagacgtgccttacagagcgcatccagccagccaaggaaggagtggagatttaaactcccaaggctggttctcttttgcctgaggacagcggcctccattgacccatccccaaattcacagagaaatttttacgtaccaaatttatatttcttttgagataagaatatttcaatccccttgagacccttgagatttttaaaatccacttttcaagtatccttttctattttgcccacttttcaatatttctagattaaacaaaaaagcccaggtcaggaagatcagatgcttttatcttacttgggcatttctattaagtatcaagttgatggtgcttcgtatgtttcattagatttctctattttgtgctttttttttttttttccttctttttcttctgtttgggtgtgctgacatttgtgcactgtgtgaatttgttccatgctaacagagtgagccagaactgctttcaggggaaggaagacagggtggggcagacaggtcgggcgtgtacttggcttcattgcactttattatttatgatatagagattgcagacatctttgttcttttctgtctgttaaaagtatagcttacttacttttttctcattataaggaattaaagaaactggataataagatgaatatgaagaaaacccttaaatcactgatgttccaatcacattaatttttttacattttgagttatttctttcttgtcttttttactctatttaattttgattattacagagtatggattccactacataggcagttttttcttcctgatttttcttcatttaatattaggtgataagcattttatgtgtttttgtttgaatttattaatatatcttttacatatcactgtagatctttataatattattttaagtgaattaataggttgacatctccccaatcatcccaatattactgaagattaaagttgtttcagtttttaaactattctaaataaaatttaattttttaaaaaaatattgctttcctaagatagatgctcagaagtagaattactgagccaaaggtcttgaatactcttaacaaattctgttatacattgttaatttcctatatatatatattcacatgtccacatgtaaatattgagaatgcctgtatgactccatcctcatcagcgtgggctgttatatacttttaaactttaaaactgttgttaatttgacaacagagaattgacatcttcttgttttaatttatatttctttgattgctggtgaagttgaattccctgttttttaaaaaataagttaaatccagattttttttcctttccaacttttattttatgccaaggtgtacatgtgcaggttgggtatatcatgggtaaactgcacgtcacgggggtttggcgtacagataattttgtcacctaggtaattggcatagcctctgataggtagtttttctttctttcttttttttgagatggagtttcgctcttgttgcccaggctggagtgcaatggcgctatctcagctcatggcaacctctgcctctcgggttcaagtgattctcctgcctcagcctctcaagttgctgggattacaggtatgcaccaccaagtctggctaattttgtatttttagtagagacaaggtttctccatgttggtcaggctggtttcgaattcttgacctcaggagattcgcccaccttgacctcccaaagtgctgggattacaggtgtgagccaccgtgcctggcctctgataggtagtttttcaatccttaccatcctcccatccttcaccttcaagtaggcctcagtgtctattgttcccttttttgtgtccatgtggactcaatatttagctcccacttacaattcatgtgagagcttgtggtatttgggtttctgttctcgcattaattcgattaggataatggcctccagctgtatccatgttgctgcaaaggacatgatctccttttttatggctgcatagtgtttcatggtatatatgtaccacattttctttatctggttcactattgatgtcggtgttggttccatgtctttgatactgtcaatagtgctatgatgaacatacgtgtgaatgtatctgtggtacaatgatttatatttctttgggtatgtacccagtatgagattgctgggaagaatggtagttctattttgaattctttgagaaatctccagactgctttctacaatggctgaactaatttacattcttaccagcaatatataagtgttgcttcctctctacaatctcgtcagcatctgttatttttgactttttattaataataatagtcattctgactggtgtgagatggtatcttattgttaaatcccggtttttttgtgacataataatttatatcctttgcccacttattttttgattttgtgtctttcttaactaatttgcccttgataaagattttagccctttagtcatttttggtagaatttattgttttttttccccccaaactgtgggtcttgtcatgttcattttggcttttttttttttttttcatgtacagatatatttatttgctttctctcttgtcatttcctcagatgtatctaagcttaaaccgtcactgcctttcagtggtggatggagccccctttttaagctgtgggtgctagcctacactagccattcaaaggtttgggacagcattggtatgtggcctgagggctggttgtgaccacacacacacaccctgagtcaccaacgcctgggagactccaccttctccccactcttccccacctttggcttcccacgtctgagcgaggtgtcttatctataacaaaaccttttgacaaatgccacagcatgtcaaagtcattgctgtgaaacttcatgacaggctcctttgaacatccagatcagtcatcttcctcccacgttgagcattcagtactctcaaacgagtgtcatagatatgtgtggcgtcactgcctctttcagaagccatggtgtgtaaaggcttagcacccagggaaaagcacctgccattgacactcgggcttgggaaatagaaatatcctttcttccctccccttctccttttctccctcttcctctttttcctttgatgaatcttgacttagcctcccaggctgctgacagtggcacggagttgacttctgctcaaatgataagtgggtgccatgatccccaaatcgggcacttgatgtgaggagccaaggcaaggaacaaaaaagtcctcggagacagcccccagctgtgtccatcgcccccagctgtctcagtgcttaatcaataatccccagcacctgtcaatcagcagtgaccagggaccttcagtgtcctaatactggacacggtgactcagcattttggctttcaaagacctgccccatttctctttccccaaacctggtcctactgagtggggttggcttccctgcacgcagttccccttggcatgcaatcttggctcttttagtctttatgttttctctgttctttttgtttatttcaactaatcatatgaaatagaagatattttactgtttttgatctatcaaaatggcaatttcatgtggtttaacttaatattttcagaaattgtataagggatacaggagtatcataaaaaataaggacgacataaacaaagaatatacacaaatgttatcactgttaaattttttttgtataaacctctgtttttatgtgatacattcacatgtaactgtacacagagattttatagaaatggaatctaactacctgtataaaattaccttgttaattagcaatatattgtgaatgactttccatgtcaatagacatgcttctttaacatcattttcagtgtttattctattgtatggttgtaccataattaagcatgaccagtaattcagaagattcaggactgtgggggcaggagaaggatggggaatgtggtcagaggggtagggggccaaggtggtgtagggttactaaagccaaggccggaaagacttttaagatgctttatattgtaaagggccctggaatatttgaataaatgggaaggagcctccagctctggagagggggacactggcagccagagaaaaggttggaagtcatattcacttattcactcattcaaaagatatttattgaacttttactgtgtgccagacattttaatgggggtactgcagtgactgagacggacacagctcctactttcaaggagcttatttcatagtggggggagacagactataaacaaatgcaataattgcatattaagaaaagtgtcaggaaggaaaatgaacaaggagtgtgatgaagcttcaggaggcactggaacaggggatggtaaatcttggatagggtgatcgggtacagcagctctgagaaggcgagatttgagctgagacctgagtgagtcaggggaagaaggttctgggcagagggaccattgagtacaacagctaagtcaactcagtaaatgcaaccccaggtttgaaacattttattcattcatgtcttcacccaacagacttgcagttgagctcctcctctgtttcagataggaatgaggaaatcagatgttactcctccctcaaggaagagaggcatccattcgcttcgtttattcactcattcattcattcattcaaatactttctgagtacccattatgtgccaatccttaaccattaataaggaaatgaagatgagtaagaattagttcttttcttccagggcatttgggggaaaaaacaaggagggtgagcagaacagctcagagagaagagatggtccgcccaggatcatgataggactagaggaaggtgtcctgttccccagccagagtttccagccatgtttcctgtgaccccaaccctcctacgtcagtcctttttcaacccaaggtttatgcacacagcttcccccagcccacacctggaaaaagcattagacatttatatcattgcaggccctaagatgaagtctataaatggttctggttgcagttctctcatgttcactggatgtcataaaattggctcagtgcaaacagggagccattccctttaacagctgggtgttaatgactacactgagagcagtggagctgtgtccgggtatcccccaaacagcaaccagaagcccttgtccagttggttgcaattgttatggggccatcagtcagtgagtgtggagtatcattcataccgaggtaaccaggcggagcccagcaggaagtgtgtaattggccagcggaagattcaggaatgtgagtaaaatgagcttcaaggcatacgtcttcacctgttatcacggcactatggaaagacccttgattcggaatatctcaacttggatttgaatcctgcttttgcttttgtgtttttttctgtttgttttgttttgttttgttttgagacagggtctcactctgtcgcacaggctggagtacagtggcgtgaacacaactcactgcagcctctacctccctagctcaagcaatcctctcgcctcagcctcctgagtatctaggacaacaggcacatgccaccatatctggctaattttttcattttttgtagaggtgatcgggtatgttttatgccgtgttgcccaggctggtctcaaactcctgggctcaagcaattctcctgtcttggccttcccaaatgctaggattacaggtgtgagccgccaggcctggccgtaattttgccttttgcatgctgggtgaccttgggcatttggcttaaccccttggagcctgtttcatcatttgtagaataggcatgtgacagacactgttcgttgcccactgaatagttattacctccatctaacagagccctgagttcatccatgttgatgatgtccttaccctggggatgtgtcatgtttgggctaagccagtaattgttttaaaagcggacatgtaaccaaattctgaccaacaggacatctggttggaggtttatgaaaaacattttgtctccctttatttcctgccgtgaattcatttgtgcaaaaatgtggtagtcacagctgaagaaatcatcatagagcaacgaaatgatgagcttataaattaaagcccatgcactgggaatgacacaggggaaggagagaaagatcctgatgacaacactgaactgttgcatcaaactgggactctttgttacaggaagtaattaagtctttgatcgtcttcgggtgttctgttactcacatctgaagcatccctagctgacataaggaatgatgattactttctacagctcctgggggaattagatggcattgtgtgcactgtgctaggtatttcatcgtcaccctcttccctgatccttgttgcatacagtgtgacctcttacccagggctggagaaagcctcacctcactagaaaagagtgacatgttggtagtggcatttgcaagacagttagtggcttctagaaatactcacaggggcatattgtagtaaaacataattcagaataattgtcaactgtgcaaccacctgaccagtcagaacccacctaattaactgaacatttattaaatgggtgtaagtccagagtgattctttcaacagagtttgtcccacatgtgaggggacaatgaagttggttgtcttcatttattctgacacctatcccatccgaggtagttagtctaaatcaattaatatgatttcactcaccttggtagtgattggctcaggagtggtcatgtggcccagttctggccaatgagatatgaggggaatttactgtgggccttttgggagagtttcctctttcctaagagacagccacaggaagcaaggatctgccactttgccttgatgttgcagtgtctggtggagacatctggaaccactgtggccatgttactgccaggctgaggatgaaattaacactgagacagggaggatggctggaaggagcccactctggtggcaatgctcagttaccgcagtgccagtcctggagcctgacctacccatggggtttctaatacgtaagctaaatatttacttatgagttggggtttttggttttttgctgaaagcatcctgtctgatactctgagtttacttaagagattttagtttatgcaaagaaaatccagatgtatacccagttttacggcaccaggctcttgcaagaaatgaggcagggctttggtaaggaaggtggcaccatgcttgtttttatggattggctaagaggcatccctgtgccaaagctggacaagagagcttggctctgttgaagctgcagggtggtaaaggagcggaggtatctctactgtattagtctccagtgaaacagaaccaataggctacgtgtgtgtgtgtgtgcatacacatacgtgtgtatgtgcatgtgtgtgtgtgaagagagatttattttaaggaattggctcacttgattatgaaggctggcaagttcaaaatctgcagggtgggccagcgtttagagacccagatgagagccaatgttgcagttccagtctgaagaccatctgctgcagaatttactcttgcttaagggtggtcagacttcttgttccattcaggtcttcagctgactgggtgaagcccactcatattacagagggcaatctgctttactcaaaagacactgatttaaatgttaatctcagaaacatccagaataatgtttgaccacatatctgggcaccatggcccagccaaattgacacatagcattaacaatcacacttgccataatgttgtcatagtgatgacagtgaacttgacaagcactcaggagatggatgtgcaaagatgcactaggtcagtgtccttagcagagtgaacttgacaagcactcagcacatggatgtgcaaagatgcactaggtcagtgtccttagcagagatccaggattgatgacatccccccctgtcgtccacaagtccagaaacctgtcccctatcaccactccgggtcagggctgtatatttctcccctgtccgacagccataacaggcaccctacttccaaccccttccttcttccagcagccttcactctgattgtgccccaacaagtgccactgctcaaaagcttttgatgacttccatgtgaaaatggaatggagatgaggcctctgagcctgaccctgaggtccttggcatgctgtcctgtgtcttcccatgtgcagcttccattgctcttccccccaaatccttccttctactgtctgctttgctcagactagcgcatctcaaccctagttgcacatcagaatcccagagaactttaaaaaaatacagatgcctgggccccaccccagaccaattgaatcccactgtctgggagtagggtgggggtctgtgtttgttgtttttttttgagatggagtctcgctctgtcgcccaggcttgagtgcagtgatgcgatctcagttcaccccaacctccacctcctgggttctagtgattctcgtgcctcagcctcccgagtagctgggaccacaggactgcaccaccacacctggctaatttttgtatttatagtagagacagggtttcatcatgttagctaggctggtctcgaactcctgacctcaagtgatccgcccacccccctgcttcccaaagtgctgggattacaggcgtgagccaccatgcccggcccaggggtatgtgttcttaaaagcaccccaggtgctcctgaggaacactgctctagacggtcttcttctttcccccatccttcgtccttccctgaggaaatacttttattattaaaggacttctcacaggcccctcctccaggctgtcttccctgaccaagctcttctaagttattataactcagagccctgttgcccgctgctctgttcttagcaccctcaactaattcggcattgtatttggctcttgtgtgtcttataccccacaagttcctctgtgcatcctaatatggaccatattttgtcactgtgcactctgcctcctctcctaggatgcttagtcaagactcccttcttgtctttctgatggactcctcttcaaccttcaaagccttgctcggacatcatttccctaaggaccccttccatgagcctgcactagagcccagaaccgactcccctgtgctgcctctgcctgctgccagtgcgttcatttgctgctgtgcccctctccccctgcagggtgagtgtcgtgggtgctgaatcaatgccagtcagatggctctgcatttgccgtgtgtgaccaccataaccatctttacccacatctcaccgagtactgactcgtagtaagcatttgaaggtttgctgaagatgagaacattagacactgggaactactagagtggggatggatgaagggctgaaaaactacttattgggcactgacctgggcgatgggatcaaccataccccaaacctcagcctcacgtaatatacccaggaaacaaacctgcataggtaaccctgaacctaaaataaaagctaaaattaaaaaaaaaacaaccggtttgccgaaccgaacttgagtaaggaagaaagggaggaaaggagaaaggaaagaaggaaggaaggaggaaggaatgaattgaaagaaagagggagaggaaggaaggagggagggagggaagaaagaattcagaaagagagagagtgaaaggaaggagaatgaagaaagaaaagaaggaaagaaagggggaagaaagaaaagaaggaaagaaagaggaaagaaagaagggagaaaggatgaaggaatagcaaaaaacccgattagagagaggtagctgagtctttgggggttgttgtgagaagcgtggcatagagggagagacagccacagaacactttttaagaagcctttttgagtgtaagtctttttgagtgtgtctttttttttcccccactaagtactctcggcccaaatccccaaaagaaaataagcgcttggagataaacacatcttctagggaagtttcttttccctccccaggaacattgctgggaaggtttctagagaagggaaaatgggtcccaaatggctgagtcattcaacatacaacaagcaaatggtcagggctggccggggagggagtgcgggtggcactcaggttgtctccatggccagcccacacggccccgtctcatggctggaatgacaattgtcaccaccgaggtccttactactgtccctgccccagggctgctcggtctcaagggcctcctgggatgctccctgggcctttgctccaaagctgcagagcccagccacagatgaaccggatccttagcctggccagggcctcgccccaaactgggaacggagctacgtcccagcctctgtcctgcttggctgatgtgattccgccttcgcccccaagtctagccaggccccggttggagctggagctgggaagagagataggggaacattctagggaaagaatcataggtgcagggcactctgaaaagttgggattgctaccctattttatggatgaggaaactgaggcttatggaggacaagagactcgccaaagatcacacagacaggaagagacagggctggaatcggagccctggcctgttggtctcttcagctgccttttccctctctgctgtaggtcagtatctatggaggtggaggtcatacgcttctttttctcccaggtgatgtttgccaaatcattttaaagaaaaaaaaataaggcaaaaacaaggagagtagatattttgggtcagaagatgacctctgatctactcaaactgggctcagatgcagcaaccaagagggcaaatgtctttttcccttaagagttgataggtattgactgagcctggatccttgctggactctgctggggacttgggagacagccatggataggacagatgtgggccttgccttcatcaactccatagtctaagcctggctaccatctgaccccagtcaagctggtacttggtagtgtggcaccccgggccctatagtcccatgtcacttgacgtaatgtcttgggcttttggtcctaggcagggctgaattgggaagggatggggaaattgaaaaggaggggcagatggttaactagctgggacatgcagggatggggtgacctggagctttcataaaagaaaggggatgaggggaggagggaatgtatatttagaaataaagagtctgaccaatttaatggagagaagaagggaaaaaaatccaagtccccgcagtaacctgtttgcaggagctgcctaatttagcagtaaagcatacacactggccctggcatgggctggtggaaggtatttcctccccagcctgggtcaagtttcattcataggtactgtctaaaattagaccctctgctttcattctggtccaaactccctgcctagcgtaatatttgggagaaacactcccattaaaagtgcgccttcctcccaacggcccctggcctgggaagggctgggtcctgtcctcgctggcggccgctgcggctcataaacccgggtctaaattcaaagcatccgctctgactggtgacctctggctcctgagcaaaccatgccgcctcttccaactcacacccaaggcctggccaggtcactgggagggacccatttcacgcctgtgaccttctgtcgaggggagtgtgagggcagctcctcctcgaagggaagaggggccggacacccctggggccatgtgctggggcctcttgtgggggcatgtcctgctgtcttctcttctgggctcagagagcctgccagctagactggcctgttttatctttattattatttttctctaaattaatgtaacatcaaagaaagactcagtgagacgggaatcagcaccgtgttcgggctgctttattcatttaataggcattgactgagcttcttgtgtttgaagtcttttggtggtaacagaaatgaggacactgtgggagcgcccggcctcctagagtcagactccagccagggatgggctggaaccccaaaccaaacatggtgggaagccccagaagtgttttctctttatctcttgcctctacttctctcctagctgggttttaactcttctttcatggtctgcgggcccttctgctcctcggtcaccgcagcagaacggggatcttgttcctatgggctctgttccaaccatctgtgcagagcttgactcttcttcctgggttccagttccaaagccccagggaaggtttctaatgggcttagcttctaccaggtgcctgcctctagacggcgccaggggcggggccatttactagcatgactattctgctggactcgtgtgaatggcatgaggaaaagaagtgaaggggcagtttgaacaccatgcagtcactactcagctaggggcctgtggaaacacagcaaaggatcttaactcaggcttggcaggtcagggaagcttcttggaagacctggaaggtaacctctgagctgggtgagttggctttagtcaggacctgagaaggaagggtagggaaggctgttcaaagaacagcccaggcgaagacctcagggcaagatccagaactgtggggtaggaatcccagcagcactgcgtgcctgctgtgccaaccttgggcaggtcactgcactctctgggcctcggttttctcatgtgcaaatgggaatcctaacactcttctggagttatgaggattcagtgagatcacgcctgtagtagtggctggcactggctggggggcagggcgtgcattgaatctgtcagccctgggtggagacaccctttctggtcaagtagtattccatcagctggttcctttgcaccttcaggtctcagctcagacatcacagggacatcaccagagaagccctccccgaccagccttcaaaatgcactttcctttcagatcctaatatgccatcttgtttcggccacagggtttttctcaacatgcagtgagggctggggtgaacaatgagaaggagtcttaggggaggttagcagggccactcagaaggcagcgccacagctgccacaagcatgcagttcaaaggcttcggtgcttgagccccttacccagactgaaagtatccggaaaactggggtggagtcctaaccaccctgttccccaagactgctccaactgggcttttgaagttgggaagggaactctgtccctaggctgcctgggacgttgagtcctagggccccagtggaggctcctcaccctccccacctcactggtactcaaatggatgagctccgccttgcagagttgtagactgatgctgagagagacaagagcggggctggcccaggcggccacatcaccagccttggggtcatgacttaacatcatcagtcctggcagaaaggctgacccccctcttcccatggcccaccacttaccccctccagcccgcacacaactgattctgaaaggaggatgtgagcacacatgtttatttggaaggtaattccagaaagtgctggcaaggggaacagggctatgagacagagaagggctatgagacagagaagggcaggaggtcaatatgggggtcgttagtggtgtgggtctgggagtggtgtggaaagtgtgcctttcaggctgcccgccaggaagtgggagcaaagtgttccatgccaggcccacggccatcgtttgaggggccctgcaggggatgttagctccccatacctctggcttgtcctgtgtgtagttagctttcagataggtcataagagcttcacttggtcacctctgggtcaacatgcagggtaatggagagtgaggagggtgtatggacaggggcttgtggcagctgtgaccctgccctctgagtggccccgctaacctcccctaagactccttctcattgttcaccccacgccttaccccaaggaccgcctcactgattcctgagcgctgactttctactggtccatcaacccctgatgagttgcccaccctaactccaccaggactcttcatgtccccacttaaccttccgttggctcctgttctcttagctcagctcctgccatcacccctgtacgggggcttggggatgtgagtgggattgggctagacatcctcgccggaacagcgggagggtgggtccatttcctgagcatctcctcctgggagcttccctggcctgtagagtgagtcatgtcctccgcctccccctactgggccccctccccgtctcagagagggatgcactcctgccctggtccggcctgcttcctcccatttcccattgaggagcagggatttgttcaggcccaagtggtctgggggaccatgggccctccagctgggctcaacatttgagccccttgttgagcggccttggggaaaagtgctcaggtgttctatgtggctcaccaggtcctggaggcaccaggtggctcagttctcttggggccctggacaagggagggaacatactgcccctgtcgctgcagcacggctctgaggaaagttcgtcattgctcttctaccactgaggaccagcggctcagaggtcagttccttgcccacggccacatagccagccggtctcaatccaaaacccagggttctaaatcctcgggattactgagcagcggtgtgtccagaactgtgctgttcaccctgagaggggcaaagggaaatattacccgggccaccctggggagcctggtagcgcggctgacctgcaagtgctaagggcaaggcctggaggtcatgtacctacatcacttctgccttcatcccatcggccaaacttcagtcacatggcacaagcagctacaaggctgggagatacagtctggaagaggagaccagggtttgggaaagcactagcagtatcggcctcaagtctgtgtgtgaaagcgaagggcagggcctcctttctgcttcggagttgacaacctgactgccctccaccacgtttcactgtcccccacatgggtctctgttcttcagagggccacagctcaagctgtccggcccacatcctggagctctgggatggcagtctcccattccaggcgctcgagcctcacaatttttgatgcccgtgtcctgtactccccccataatggcccacagttgtggaggtgtgcctggcttgactgaccgatggggattcccgtgtgagaaaaaaaggtaaggcccgctgtgcaggggataagcccctcgcaatgatctccctggtctctgtcacacgtcctcctttcaaaagctcgcctggattttggaagattatcttcctgacccatagatattgaccttgcccccacgctcatccctctttcctgcagcaggggatttccacaggcctaatttacccagactggaagtaatgccatggtagcccccaagccccacagaacaggacaccatgtggttttgacatgctgtgttctgtagaactatccaaagctgctgtgggcccaccaagcctcgctccttttttttttttttttttttaattttactttaagttctgggatacatgtgcagaacgtgcaggtttgttacataggtatacatgtgccatggtggtttgccgcacccgtcaacccatcatctaggttttaagccctgcatgcattaggtatctgtcctaatgctctccctccccttgctcctcacccgccgacaggccctggtgtgtgatgctgccctcactgtgtccgtgtattctcagtgtttaattcccacttattggtattctgttcctgtattagtttgctgagaatgatggcttccagcttcacccatgtccctgcaaaggacatgaactcattcttttttgtggctgtgtagtattccatgatatatatgtgccacattttctttatccagtctatcactgatgtgcatttgggttgttggttgcttgctattgtaaatagtgctgcaacatacatgtgcatgtatctctatagaagaatgatttagccttgcttctttatggtttcttcaccactgtgagttgtaaacatgattctttttctgattgcccatgcagaggctgactgctgggttgatccccccataccaagacacatgcacaccacacacagtgtatatttctaccagacatttattctcagaaacaattttttcttccccaaggaggtcaaactttaaatgcatgcagtggtcaggaagctcacatcactgagtataccagggccagctctaggacgatcaatggtgacccacagcctgtgctgaaagaggccagtgggtaggggcagtggccttggccagcgtgtgacccacttcaagggggagcccaccacggagctccaggcaaccactgctgtgcaggacaggagctcactggggtcccatcatctcatgcttcaaaagaagccagaaaactatttcatcttccaaaaaatgggaaatctttcattttaaaatgtgggcaaagccaaatttaaaacactatgtgagtgaaatgtctgccacaactgaacctgggctgtgtcagtctaagacttatgcttggaacctgtaagaagaacaagtgtgcgtgcatgcatgtgtgtgtgtgtgtgtgtgtgtgtttggagggatagtgaagttttttcctacagctacaaatagaacatgctttcctatacaattgtactaatcaatattatttccttacattatctccagccatttccctataattagacattcagattatttcaaggttgttattcctataaacagtgatgtgatgaattttttaaagttggttcctcacatccgtctgttcttgtaaatgtatccatcatagaactggaccacaaaggttggttcctaagattatcttctcctttaaactgacctccttgagaacaaaggacatcttatttttttttctgagttcccatggcctagcacttctgtgatccatagcactctgcttagatcatagaaggcatttggcaatattcattaaatgaagaaatagggtcagaaaagaaagaaaattagctttacaacgccatcagagaaaaacttcaaatgatttgtacagctgagccacagtaatgaaagcagtcttttgggggaagacatagacatatttctttgctaatgtcaccctataccactaagtcacccctttccatcctggaatctaccttgtccccatcaatacacttaaggtttgtattatggaacacaaaagacaattcaaatttccctggaataatgattatgactgaattcacaaacttgaggtttgtattttatttttcaacagaaattaaaatcaagtcgagtcttcaaatgatagatggacaggaagcccaagatctccctcctgggcacctcctcccttgaattaccaaagatctccagtggtttatatgatctgaaacttgtaatggactctgagagtggggacctccttacaattttcaccctaggcaccttgcttcccttacacaaaagaaaaaaaccatgccaaggtacagtaccagcttattgaaggaggcagtttctctcccagtgatgatgggctggaattcctcatagatgtgttgtttccttggctgctttgggcctctgttcttgtgtttgagtggcaaggcccaagggagagggaataattgcatcttctccatctaatcctttccaatatgaataaaagaagggcatttcctttccatataggcaaagggggaaatgccaacattaggaacatgggagtggcatccttctttacgattgtcttgctaatgggtatggggcttctttttggagtgatgaaaatggtctggaattacatggtggcgatggttgtatagcagccttgtgaatacagcactaaaaaactgaattgtacatgttaaaagggtaaattttatggtttgtgaattatatttcgatttaaaaaaacatttgaagactgagtttacagccatttgcctccaccctctgccatctgcgctcttctgctggcctgggacctggactctgtccctgccgagctgcccctccctgaatctggatcctgggccgaagctcactctgcagaggagctggccaggcctggctcagggagtccagggagcccctatgagccacagaccacttgtgctgaagggtagatttatggcctggaggcccccagcgtaaaaatgagtgtgggatggggccagtggacagaggctgctacacgggtaaccagcgactggaaataagaatgttttctttcctaactccgggagagaaaaggggcagtgtagtcccaaatgaagaaagacaagatccctgtattctgaatgtcgtagctgaaaaacagcattgaaatgattttaggtgacagataggtaattattttttatgggattctactgatgtacatttgatttttaaaaaaatcttggttcagaataattttggcttgttatcactttaaactgagaccctcaaatctcccgagatcagatgacacactggtccacccttacggagggaaattttctctcctcctgcttctgcactgggtgaaagtagggtgaggggtcctgttctgcagctggacaggggtctttttgtgctctttaattaggagagggaaggatggaaagctatgttacagaagaaatgatctaagtcttcaaataatacatacttttaactgttaagtcattttgagaatactttatcctcagtgcagtgcatcttctcaaacattcgtggacagtatttagtctgtgtaaaagtttgggatatttctatttaagtgtcagaagcccaactcaaactggcttaactaaaaaagaattttattggctcttgtaaactaaggcagttagaacttcaggcatggcttgatccagggcattgaaaaagacgattgggtctcagtttctttttctccatttcttggctttgcttctggtgttctgattctgtcttcagaatgaactttcccttgtggtagcaagatggccaccaggaattccagcactcatgcaaaggttcaagtcccagcaaggggctagttgtagctcatcagttctgacccattaccatggccaagagaatgcaacgttagaattggctaggcctacatcatgtgtgcatttctggagtaaggatggaactccatattaatcatgtggactgacagtgggcaacagtgtagttctttagagagaaatcattgcacatttactgtgagaaaggagaatgattgctagatggtaagaataacagatgcccacaatacccagggtagtctatcatgcaagttaaaaccctggacttctggccgggcatggtggctcacgcctgtaatcccaacactctgggaggctgaggtgggtggatcatttgaggtcaggagttcgataccagcccggccaacatggtgaaaacctacctctacaaaaaatacaaacactagtcgggcgtggtggtgggcgcctgtaatcccagttacttgggaggctgaggcaggagaatcacttgaacctgggaggtggaggttgcagtgagccaagattgcaccactgcactccagcctgggtgacaaagtgagaccctgtttcaaaaaaaaaaaaaaaagaaagaagttctcttgagtgaagccattggaattttgaggtttacctaccttaaatgatacagtacataatgttttaaatacttttagcatgtattatagagcttataatttattttttctttttaaatgttagattcaggggtacatgtgcaggtttgttacatgggtatactgtgtgatgctgaagtttgggctttgattggacttgtcacccaaatggtgaccatagtacccaatagggagtcttcaacccttgtcctccttcatccctctcctcctgtaaggtcccccgtgtctattgttcccaactttatatctgtgtgtacccaatatttagctcccatttataagtgaggacatgcagtatttggttttctgtttctgcattaatttgcttgagataatggtcaccagctgcatccctatcgctggaaggcgattttgttcttttttatggcttcatagtattccatggtgtatatatgccacattttctttattcgatccaccactgatggcacctaagttgattccatgtctttgctactgtgaataatagagcttatattttttaaaaaaaggaacaaaggaaaagaaaatgaaggccaagtggagatcatgagaatgacaaaataaacaagaggacctaccagatccaaagttttgataattctcacttctggagtagatcacagcttactggggttggggggcaattaaggactgccgttcagtgtctatgctttccaaatttctttgaagactgtcatgagtacaaacactgacattttctttctgaaccacttcctcagggtggtgtgaagctggaaggggagggtaaatcataggaatggtaataacaacggcaagagctgtgcatacggtagggggttactgctactggcccccaccaagcccacaccacaccgtctcactgaatcctccagcaactctcggaaaggtctctttgcttccagctgagaggtgaggtgactgaggatgtaggtcgcacagctaaggatgccagcactgtctccttacctgtctgtcaggctcacaagtaaatggtctccgtgcagaagaggcatctggcaactgactgtgctgtctgcccagaagtggatgtggcagtggagagcagtggggtgaagccacggtagccctaggtcattcctcaggctctcccattcactcctgcagggaaggggttcacgctgggagggctgcttttgtgggggctgaactggcacccaccaggctccacaagtctttccacttctcattcttttagctcaatctctagctgtgttccatatttctccctgtcaccatcactgtcacccaggcgagtctagcctgtgtcagctctcagaagagtctcttttaccagctttttaagaatgtgtttagatgatggggtttcctaaatatacaatcatgtcatctgcaaacagagagacaatttgacttcctctcttcctatttgaatactctttatttctttcttttgcttgattgcccaacttcagcaaagtctcaggatacaaaatcaatgtgcgaaaatcacaagcattcctatacaccaataatagacaaacagagagccaaatcatgagtgaactcccattcacaattgctacaaagagaataaaatacctaggaatacaacttacaagggatgtggagggcctcttcaaggagaactacaaaccactgctcaaataagagaggacacaaacaaatagaaaaacattccgtgctcatggataggaagaatcaatatcataaaaatggccatagtgcccaaagtaatttatagattcaatgctatccccatcaagctaccattgcctttcttcacagaattagaaaaaactactttaaatttcatatggaacaaaaaaagagcccgtatagccaagacaatcttaagcaaaaagaacaaagctggaggcatcatgctacctgactttaaactatactacaaggctattgtaaccaaaacaggatggtactggtgccaaaacagatatatagaccaatggaacagaacagaagccttagaaataatgccacacatctacaaccatctgatctttgaataacctgacaaaaacaagcaatgggaaaaggattccctgtttaataaatggtgttgggaaaagtggccagccatatgcagaaaactgaaactggacccctcccttacaccttatacaaaaattaactgaagatggattaaagacttaaatgtacaacctaaaatcataaaaaccctaaaagaaaacttaggcaataccattcaggacataggcatgggcaaagacttcatgactaaaacaccagaagcaatggcaacaaaagccaaaattgacaaatgggatttagttaaactaaagagcttctgcacagcaaaagaaactataatcagagtgaacaggtaacctatagaatgggagaaaatttttgcaatctatccatctgacaaagggctaatatccagaatctacaagaaacttaaacaaatttacaagaaaaaaacaaacaaccctatcaaaaagtgggtgaaggatatgaacagacacttctcaaaagaagacatttatgtggccaacaaacatgaaaaaaagctcggcatcactggtcattagagaaatgcaaatcaaaaccacaatgagataccatctcacgccaattagaatggcaatcattaaagagtcaggaaacaacagatgctggagaaaatgtggagaaataggatcactgttacactgttggtaggagtgtaaattagttcaaccattgtggaagacagtgtggcgaatcctcaaggatctagaaccgaaaataccatttgacccagcaattctgttactgggtatatacccaaaggattacaaataattctactataaaggcacatgcacacgtatgtttattgcagcactattcacaatagcaaagacttggaaccaacccaaatgcccatcaatgatagactggataaagaaaatgtggcacatacacactgtggaatactatgcagccataaaaaaggatgagttcatgtcctttgcagggacatggatgaagctggaaaccatcattctcagcaaactaacacaggaacagaaaaccgaacactgcatgttctcactcataagtgggagttgagcgatgagaacacatgcacacagggagcggaacctcacgcaccggggcctgcttggggggtgggaggctaggagagatagcattaggagaaatacctaatgtagatgacgggttgatgggtgcagcaaaccaccatggcacgtgtatacctatgtaataaacctgcacgttctgcacacgtatcccagaacttacagtatatatatatatatatatatatatatatatatatatatatatatatatatatatataatgagaatgtgttaaaaaaattaagatttgaggcatcccacctccctgcactggccagtcactccccagcttcagactgaggacccagagctgttttgaggctcatcaaaggtgttcaagcaaaccagctcctccccaccctgcctgagctttccactctccagggcatggaggaaggggatgaggttaatggaggagactttcgatgctgactgtgcatacagactctcctccctttgaacacatggctcagttctttttcctgccactccattacagaaggtgtccctttctccaactggggagccatgcctaagactgtgcccagatactgagctatttcattcatgtgaaatttggtgacagggagaaggtgggcaagctcattacactgaagaaggcacatgactgtcgggtagtccagtctccttcccacttcaccggggagaaatcaccatgagggatgctactctaaaggtggctgaagggatgggtggggaggaggtttggctctagaatgacaggatgttgcttccctctgtgtttcaccatcccagaccactctgggaagactgtgctgccctttagcactggtgagacggaaagccaaatgcatgccaggcacaccataggaccaaggtttttggttttgagtctttggttttttgtttttgcaggaaagagaagccagctctataatttcacaaagtctccccaccttactcatctcgagtagtgaccaccgtgaatggtcccaccgccagcctcttgggaggcagccggggaaagcactccatcctgggacttaggagcatgaactctggagaaacacagacctgtgttcaaatccgagtccactgcgtcctcacaatgtgatcttgggtaagtcatttggcccctctgggtctcagacgtgtcctgaatttgcccaggggatgaacagtgctggaacaggaggtggctgagtacagggtctggcacttggtaggtacccaggaaggggtgcataccatccttattttgccttgataaagagaagataggtctctatgattattctagaaaaagatcagtggggactgtgggtcgagaggctaggagctggagagagaatggcagagggaagtgtggacacaaggggaaggaagagcaggcaattcctgcagggccctggtgccatggagccctgggatagaggtcagagaagcaagatatggcggtgggggagtgtccttgggtctgtgggtggacactaagggccggcatgtgaccactcgcaacccccacccccagcctagcccgacctccaccaggggacactcacctcgagctcattgccactgtccagggtcaattcattgcccggggtactttgtgccaccttgtagtggcaaaatcttgattttgcatcctcaatgagaacagacagattcatgtagataaggtgagaatcagcactgccactcacgcctaatgctcacaggggcctgagcagcatgaaccctaggtagatagaatttcacaggatgccaaggcacaatcagaaggtggcttagactagggcatgggttcagagccacaggtgggaggacccctcccctcctctcccgccaccccctcctcgactacctccattccttcctttttcccttcctcttttatctccttttccctacttctcccattttccttcctctctacctcctctccctcctcctctttccttctccctcctcctggatcccctcatccctttacttcctcctctttctgctactttctcttcctcctctatttcagacacagatccaatgtgcacagcaaggcattcaaatagcacaaaggctagatcctccaaaggaatttcaccttcagctctgactcccagttccccagtttacctgtctggagccaccatttagaagcttatgtatataaaggtatagatttgtgggtatgtgttttacagaaatattagcagagcatatgcatttttctgtgcttttctaacctaatactatatctttgagacggtttcacatacatctaccttattcattttaacagctgcagaatgttccattgtatggatgtcttttttttttgagagagagagtctggctctgtcgcccaggctggagtgcagtggcgcaatctcggcttactgcaagctctgcctcccgggttcacgccattcttctgcctcagcctcccgagtagctgggactacaggtgcccgccactacgcccggctaattttttttgtatttttagtagagacagggtttcaccgtgttagccaggatggtcttgatctcctgacctcgtgatccgcccgcctctgcctcccaaagtgctgggattacaggtgtgagccaccacgcccagccttgtatggatgtcttatgatttatttaatcagactgcaattgatggacacttaagacatttctactcttttgatgcttataaataatgcagcaaatgctattttattgataataatgataatggttaacatttgttggactcctaactaggaactattttatgtttccctgtattaaatcatttaatcttcaaaataaagctagattgcaggtactcttatcattttatagatgaagaaaccaaggcacgaagagattaaatgccctgtccacttctttgcacacatgagtgattatatctatggaataaattcttacaagtgtattttaaattttcatagcttttaccaaattgcccttctaaggcactgtagcagtttattgtctcatcaactttgtataaaagtgcctatttttcttatatatttctcgtatatattcactaggataggagaaaacttgtatcttgtgatttaatttgcattccttttattatgagtgaaatcgagcatcgttttatctgtttaaagccattttatttatttttccctgaaccattaaagtcctttgctcatctttcctattagactcttaatctttttcttgttagttttaagaactttttaatgtattaataacctaccttctttcttttaaattattttaggtaaaatgttttataaaatatgtcacacagagagaagattgtagataacacatatgtccagtataaagaatgataatataatgggccaggcatggtggctcatgcctgtaatcccagcactttggaagaccaaggcaggtggatcacctgaggtcaggggttagaaaccagcctgaccaacatggtgaaaccccgtctctaccaaaaatacaaaaaattagctggacgtgatggcgggcatctgtaatcccagccacttgggaggctggggcaggagaatcgcttgaccccaggaggcagaggttgcagtgagccaagatcgtaccactgcactccagactgggtgacagagcgagactccgtctcaaaagaaaacaaaaagaataaaaaaagaaatgataatgtaatgaatatccagggacactccattccccttaggaaaaatagcatttccaggtcctttgaagctccgtgtggcatgttctcaaactgcatttctctacctatcaatcaggaaattatcaccctgaagtttgtgctaatcatttcttttttctttgtttaaacttcctataaaaggaatcataccgtgtgtatttttctatgactttcttctatcattttcattatgattttgagacgcatctgtgttcatatgcacatatgtagaagctgtggttcattactgatcaatgctattgagtgtttcatgattatgccatttacatgtgaaaagtaaaacccaacagcagtatataagaatttccattactcgacattcttaccagcattttggatgggagtataatgagatctcatgaatataattggcatttccatgattattgaggttgagcatattttcctactttatgagccgttgatgttccctcttctctgaagaggttatgacttttctccattttctattgtatggtttgacttttccttgttgatccatcagtgttctttatatattctggatattaatccttagtcagttatatgtgctgcaagtacattcagtttgtagcttttctttttactgtctttatggtgttatttcatgaacagaggctcttaaatttaacgcagttaagtttattataatttttaatgatttctgctttttgcatcttgtttgaggaatccttcctttttctgaagtcagcaatagtattttccttcattgccttccaaaatttttaaagttttgccttttgtatttaaggctttaatccatctgaagtggactttttttatgctgtgacataggaatccagtctcattcttcagccatatgaatggactattgtccagacaatatcttttgtcactcatcttcaattccactttggcataaaccaagtttctttgtttgcatgggtctgtttctggtctctctattctttcacactggtatattttcctattcttgcacctgtacacactttcttacttgtcatagctttataacaaacctttatatctggtaaggcaaattctcccctagctccttgttctaataaagagaatcttttcaccattaaatatggcagtttgctatagattttttgaagatactcttgaagaggtggagaaagtatttagttccaattgctaagagtttttattatgaataaatgttgaaccaatcagatggtttttctctgtaattatgtttatgtgatgaacaacataaatagatttgctaatattgaaccaaacttgtattcctaggtaaagccaatttggtgaagttggatttttgtgggttttttgttttgttttgttttgtcttgttttgttttgagacagtctcgctctgttgcccatgctggagtgcagtggcgcagtcccagctcactgcaatctctgcctcctgggttccagcaattctcgtgcctcagcctcccgagttgctgggattacaggcatgctttaccaagcccagccaatttttgtaattttttagtagagacgaggtttcaccatgttggtcaggttggtctcaaactcctgacctcaagcgatccgaccacctctgcctcccaaagtgctgggagtacaggcatgagcaactgtgcctggccatgaagttggatttttaaatatccattgttgaaatctgtttgataaaattttgtttagggtttttacgttgatctccaaaaatgaggtaggttccttgattatgcttttatttcctgactttctaatcaagactgggtcaagctcataaaatgttcttttttcccctctattatttgaaaaagtttaagattgagttacctggttggtagaatacttgtgaagatgtaaggatgtttgaacctgagttttcttcatggggagcttttcaatgaccgattcaatttcaatgactgattcaatttcattgggtttcttaaatttctttttttttcttgaatcaagtttaatgagttatattatttgaggagtttgctcctttgtctaagttttccaataaattgtcaaaatttttctgcaacatttttgtattgtctgtttaatatcactatcatctgtttttatgtcccttttccttaatgtttattgtgtcttttttcttttttgattagtctgactagatatttgtctactttatccatctgtattgtctattttattaggcttttcaaagagaaaacttgtggccttgatgatcctttttatttattttatttttttagagacagtctcattttgtcacccagactggagcacagtggtgcaatcatggctcattgcagcttcaaactcctgggctcaagtgatcctcccaccttagcctcccaagtagctgggactacaggcacatgacaggtgcctggctaatcaaaaaaaatttttttgtagagatggggtcttcctatgttgcccaggttgttctcaaactcctgagctcaagtgatcctcctgcctcggccttccaaagtgttgggattacaggcatgagtcactatgcccagctgattctttttattatatgttttatttttcaataatttttccttttattatgtccctcttattttctttgggtttgtgctgtagaatgcttaggttgttaatgttgagctttattctttttaaatataaacacttaaggctacatatttccccaaaagttcagtgatagctgcattgtataagttttgacatataaaaattttattatttagctttaagcttttcttttgttttgagacggagtctccctctgtcacccaggctggaatgcagtggcaagatctcggctcactgcaacatttgcttcccacgttcaagtgattctcctgcctcagcctcccaagctttaagcatttatttatttatttattttattattattattttttgagatagagtcttgctctgacgccaaggctggagcgcagtggtgcgatctcagctcgctgcaacctctgcctcctgggttcaagtgattctcctgccttagcctcccaagtagctgggattacaggcacccgccaccatgcccggctaacttttgtatttttattagagacagcgtttctccatgttggccagatgggtctcaaactcctgacctcaagtgatccacccgcctcggcctcccaaagtgctggaattataggagtgagccactgtgcccagccccaagcttcatgtatttaagtggtttaatatatcagtgcttcttagatcaatgagttatttataaatttgtttttaattttccaattggttcctccagaaaatttacatgcaaattgaactaaataagaaagttaatatctctgcctttctactggtaataaaataatcttcaatgctgtaattccaatcaccttctcctaaaatatgttattttgatcatctttgttctatttcatttccttccccagcctagacgttactctatttttaccttttccctttttgtttttcatttctactcacatttgaaaaatttcctcagagataattatcattttgtcagaagcctctcctttggaactgtcttgatggcaagctctctcagctcttgtgtctgaaagtgtatttattttgccctgtttgtgtattcatattcagaatgagttgcttgattacagcacagtctggggccactttaacaatctaatcaacaatctctgcttttccaaatgattttattgagatataattaacacataatgaagtgtgcatgttggaatcatataatttgacaagtgaagacaccacccaaatcaagataataaacatatccattatctccagaagtttcctcatgccctttgcaatctcaccttcccagctctccctgccacccatcattccccagacaaccactgctctgcttcctgtcactctagattagtttgcattttttctggaattttgtataaatgaaatcatagcatgtatactctttttttgtccaactttattcaggtagcagaattattttaagattcatccatgttatttcatgtattaatacacaggtttttattgctgagtagtattccatgatgtggatataccacaatcgatcgattggtggacatttgtttccagtttttgggtagtataaataaaggtggtatgaacttttttgttcaagtctttatatggtcatacttaattttctttgggtgaatacctaggattaggatggcttgctcatatggtatgtgtttgtttaacatttttttttttttgagacagagtctcgctctgttgctcaggctggagtacagtggcgcgatctcggctcactgcaagctccgcctcctgggttcacgccattctcctgcctcagcctcccgagtagctgggaccacaggcgcccaccaccaagcccggctaattttttgtatttttagtagagatggggtttcaccgtgttagccaggatggtctcgatcttctgacctcatgatctgccagcctcggcctcccaaagtgctgggattacaggtgtgagccactgtgcccagccctttgtttaactttttaagaaactgtcaaacagttttacaaagcagctgatccattttacattcctatcagcagtctatgagacttctagtttttctaaattcttgtaaactcatggtaagagcagtatgtatatataaatataaatataaatatatatatatatatatatatatttttttttttttttttgagacatggtctggcttcatagcccaggctgaagtgcagtggagtgattatgactcactgccaccatatctggctattattttttgtattttttgtagaaatgggattttgccattgtattagtccattcttatgctgctaatgaagacatacctgaaactgggtaatttataaagaaaagaggtttaattgactcacagtttcacagagctagggaggcatcaggaaacttacaaccatggtggaaggggaagcaaacacatccttcttcatatggcagcaggagagagaagaatgagagctgagtcaaaggggaagccctttgtaaaaccatcagatcttgtgagagcttattcactgtcacgagaatagcatgggggaaaccacctccatgattcaatcacctcccaccagatcccttccaccacttgtggggattatgagaactacaatcaagatgagattttcatggggacacaaccctaccatatcagccatgttgcccaggctagtctcaaaatcgtgggttcaagcgatcctcctgcctcagcttcccaaagtgctgggattacaggcgtgagccactgtgcctggcctttttattttattattgagttttaagagttctttttatcttctggacacaagccttttaccatatgtatgattttcaaatattttctcctaatgtatgccttctctttttattatgttagaagtatcatttaaagagtaaaaatctttgattttgatgaagtccaatttatgagtttgctcttgtatggtttgttgtttgatatcatatctaaaaattttttgcctaatccaaagtcacaaagctctttctcttattttttttctagaatttctatagttttaggtttgtgatccactttgaattaatttttacgccatgtgacttatgaatcaaagttcttttttttttgcctaaagaagtccaattttcccagcaccattgtataaaatgaacatcctttctccaccaaattgctttgcatcttcatcaaaaatctgttgttaatggcagggggtggaggggtggtggctcacgcctgtaatctcagtactttgggaggctgagttgggaggattgcttgagctcaggagtttgagacaagcctgggcaacatagtgagaacttgtcttagctaaaattaaaaaaaaaaaaaatagcaaggtgtggtggtgcacacctgtagtcccagatacttgggaggctgaggtgggaggatcacttgagcctggaaggtttaggctgcagtaatctgtgatcagaccacttcactccagcctgggtgacagagtgagaccttgtctcaaaaaaaaaccccaaatcctcagttgtttgtttatatttgggcctatttctagactccctcttgtgtttcattgattcatttgttttctatttttccatcatgatatagtttagatatttgtccctacccaaatctcatgttgaattataatccccagtggtagaagtggggcctggtgggaggcatttggatcacaggggcagatccctcgtggcttggtgctgtcttcatgatagtaagttctatgagatctggtcatttaaaagtgtgtggcaccttcactcttgctcccactctatgtgacataccggtccccactcagtttctgccatgattgtaagcttcccgaggcctccccagaagcagagaagatgccagcaccatgcctcctgtaaagcctacagaactgtgagccaattaaatctcttttctttataaattacccagtctcaggtatttctttatagcaatgcaagaacggcctcacacacatgaataccacactatcttgatcactggagctttatagtaagtcttaaagttagatgatagtggtctgccaattttattcttattttggccatactaggttggttgaatttctgtatgagtgtaagcatcggcttgtcaatttctccaataagcctactgggatttcaattgaaactgttgaatctgaaggtcagttttgggaaacttgagatcttaataatattaagtcctctgattcatgaacacatatctccatttattaaagttttctttaatttcctcagtaatgtttatagtttccagtgtatagatcatatgtatcttttgacaggtttatccttaaatagttcatattttttatgctattatgaataggattggttttaagttgtaattccaattctttcattactagtgtacagaaacacagtttactttttttgttttttgagacagtctctctctctctactgtacagactggagtgcagtggcgcgatcatggttcactgcaacctccatctcctgagtttaaatgattctcctgcctcagcctcctgagtagctgggactacaggcatgcgccaccatccctggctaatttttttttgtatttttagtagagagggggtttcaccatgttggccaggctggtctcaaactcctgacctcaagtgatcggcctgcttcggcctcccaacatgctgggattacaggcatgagccaccgcacccagccagaaacacaatctacttttgtatattgatctcgtatcctgaagccttgctaaactaacttatttgttcaggtggattctttggagattcatttggattttctacataaaacatcatgttgtttgtaaaaaaggaggttcttacttcttcctttccagtttggatgtattttttttcttcttattaccttcttgcacttgctatttagctttgtatacaaagctaaatagaaatattgaaaataaacatcctgttgctcccggtcttagggagaaaacatttagtctttctcgattgaatatgatattagttgtaggtttttagggtttttttgtagactttttttttcttttcttttttttttttttttttttgagacagggtttcactctgtcactcagactggagtgcagtggtgtaatcttgacccactgcaacctctgcctcctaggctcaagcagtcctcccaccccagcctcccaagtagctgggatcaagtagccaccatgctgggctaatttttgagtgtttgtagagacaaggtcttgcaatgttacccagactggtctcaactcctgagttcaagtgatctccccatcttggcctcccaaagtgctaggattacagattaaagccaccacacctggcctctctagacactctttatgagattgaataattcccttctactcatagtttgctgatagttggattttttttttatctggagtaaatgttggattttttttcttttttttgagacagagtcttgctctgtcacccaggctggagtgctgtggtgcgatcttggctcactgcaacctctgcctcctaggttcaagcaattctcctgtttcagcctccctactagctaggattacaggtgcccgccaccatgcccagctaatttttgtattttagtagagagagggtttccccatgttggctaggctggtcttgaactcctgacctcaagtgatccacccatctcagcctcccaaagtgctgggattacaggtatgagccaccatgcccagccaaatgtttgatttttttttcaaatgttttttctgtatctattgggtggatcatatggtttttctttttagtctttactatgatgaatgacaatggttgatttttgaatattaaacctaccttgaattcctaaggatttaaaacaccatttcatcatgaggtattattcatttctatatgtcattagattcaatacattaaaatcttatttaaaatgtttgcatctgttttcatgagaagtattggtctttaattttctcatcttgtaatttcttagtctggttttgatgttaggtaactggcctcataggatgaattgggaagtgtttccttctgttcaatttttttagaagtgcaggcatacctcagagatattgcaagttcagttccaggccactgcaataaggcaaatcacacatttttttttgttttccagtgcatataaaagcatgttctgcacatttatcccagaacttaaggtttaataataaaagaaaaaaagttatgtttacactctgctgtaatctattaagtgtgcaatagctttatgtctttaaaacaatgtacataccttaatttttttaaaactttattgctaagaattgctgacacagagacatgaagtgagcatatgctgttggagacaaggtgctgatatgtttgacgcaggattgccacaaaccttcaatctgtaaaacaaagcacaacaaaacaaggtatgcctgtgtttctgtctaacagacattatttctcccataaatgttacatattcttcaccatcgaagctctctggtcctggagctttgtttttgtgacaatgtttaactgcaaattcattttcttcaatagttttagggatattgtctgtattgatataacttctcttgtttctgatattggtaatttttatattcttttcattttttcctgatcagttgagctagaagtttttaaaattttattgatcttttgaaggaaccagcttttggtttcatttgatttttctgttgtttttctgttttaaaattcattcatttctggtggaattttaatcatttcctttcctctgcttcctttgggtttaatttgctcttttgttttctagtttcttaaggtggaagctgagatcattagtttgataactcctttcttttataatatgggcacttagtactataaatttccttataagtactgatttagtggtgacctacaaattttgatgttttttcactttcacttagtttgaaatacttttaactctccttttgatttttttctttgacccttcaattacttagaagtgtgttatttagtttcaaatacttgtggatttttccagagatctttctgttattaatttataatttgatttcagtttggtcagagagcatactttgtaagactagaatccttttaagtttactgaaacttattttatggcccaaaatatggtctatcttggtaaatgttgcttgtgctcttgaaaagattgtatattctgctgttgttgggtggagtgctatataaatgccaattaggtcaagttggttcatagtgttattcaaatcttttatatcctttttgatttttttgtctacttattttatcaactcttgacaggatgttgaaatctttgactgtaatgatgatttatctgtttctccttgtagttcaattccgttaattttgcttcatgtgttttgaggttctgttattagatgcataaacatttagaattataatttgatgaattaacccctttatcataataaaagatcttttttatctttagccatattctttgctctgaaatctactgtgatatttatataactgctccagctttcttttggttagggataacatggtatcttttctcatccttctactttcattttatacacacacacacacacacacacacacacacacacacacacatagataatggtcagaaactgttaaaatttattgaaaactataaagccaaatgtccaagaagttcaacaaatctctggctcaacaaacgtgaagaaaactataccaagatatatcctaatcaaattgttcaaaactggtaacaaagagaatatctcaaaagcagtcagagaaaaaaagacatgttacatgcagaggtacaaatataagaatgacatcagatttctttttaaagcaatgcaaaagcaatgcaagcaaaaagacaatggtgcaacattatatataattattttatatatataattcatttcctgtaaacaggatataattctttttctttcttttttgttgtttttttaatccaatctgaaaatctctgctctttaattggggatatttagcacatttacatttaatgtgattatgggtattataccattgtccaaaagctcactgaggctcttttcacttttaaaattttttctccccttgtctcattttgaatagttttaattgcttcttcaaacactagtgtgccgtttttcactatctcctagttaaaaaggaccctatcctctacatattggcatctgttgtctgatctctgattgctgcctctgatcacagaggtgcagagaaaggcagccattgttgtacctcccccattgttgcaagtccttctcctctgaatgatttccagggaatttaaagggggtagcacctttcccccaccccttttttctctcttttccaccttttgggaaccaaacattaaagactagtatttttttttttttcatctcagacattgtagatttaatctctctagatttgacttgtgacctttttagatctttaatgcctttacttaactgttgaacaactggaatatacttacaataactagtttaatatccttgtctgatagttctgacatttgtgttagttctgagccagttttgactcttggttggcaggttgttgttgttgttggtagcactgaatatattggcccactgccttctggcctccaaagttgctgatgagaaatgtgttgataatctcattgaggatcacttgtatgtgatgagtcacttctctcttgctgctttcaagattctttctttgtttttcaaaagtttatattataatgtaaagttttgattatatggttaggttataaccctaaccctaatcttagtgtaagttccttgagctcatcttccttgaagtttgttgaagaactccttggatgtttatattcatgtctttcatcagatttgggaagtttttggccgtgatttattcaaacattctctcttctctttctgggacttccacaatgcatatgttgatctgcttgatggtgtcccacaggtctcttaagctctattcacttttcttcaatcttttttctttttgttcctcagacttgataatttccattgttttaccttcaagttcactcattattttgtctgcccagatctgcctctgattcggacttctgtagtgaatttttcttttcagttattgtatttttagcttcatattttttgggttttttttaggtttctatctattaatattttcattatgttcataaattgtttccttgactttctccatatcttcctttagttctttgaccatctttaaaatagttgttttaaagtctttgtctagcagatatgccataaggttttttttcagggacagtttctgtttatttttgtcctttgaatgggctatgctttcctgtttctttatatgctttgtggtttttttgttgttgttgttgaaaactggacatttgaatctaataatatggtgactggaagttagattctctcccttcctcaggatttgttgttttcttattgttttgtttttggttgttgtaggctgtctccatgccaaggatcagcctggggtataaacttaaggtcttctcaagtcttttctgagccttcatctttcctgggacatgagtggtcattttctgatttccctgtatctgtgattgcttttgaatcttctagtctttaatgtttggcccccaaaaggcgaaaaagagaaaaaaacagagacaaatggaaaaaaaaaaaaagagtgctagccctttaaatcccctggaagtcatttcagccaagaagcaggggcttgcaacagttgggggaggtgcaacaacaatggctgcctttttctttgtctgcacctttgtgatcagaagcagaaatcagggatcagacaacagatgcctgatatgtagaggatagggtccttttggtctaccctggctcactcaagctatgtgcaggttgctccagaaacatgtgcacggctgcttgccatgggcttgggggtgggggatgaatagctactactgtgctgagagtgaaatttcccctggaatttgcaagccttcaataaactccagagtttcaaaatagttacatcagatggagtctgctagtgttaggtgggtagacagatttctggtgctttctacttcaccatctttccagaggacctcattctattaattttctgcttcatatattttagttccagaatttgcattttgtcattttttatagtttacaattctctgcagaaatatcaatctcttcaatgattatatctttctttacctctaaaattttaaacatattaaaatggttgttccaaagttcttatttgccagttccaatgacagaatttcaattctaattatatttcctttgggagtctgtttctgttgattatgctttctcttgattataatcattattccccccaccaccacgagattcctcagatggcttgtactttttaaattgtattccaaacactatatataaatagcagtgaagactaaaggatacttttctttgtttatttcccacactgaaaaccctttcttatgactgatggttaaagtaaatgtctgatcattcacatttctccttgatcaagttgagatggggctgggccacagctttaattagattgagttcatctgtgtgattgtctcaatgtccaaaccccaaagctgttgttttttgttttgttttgttttgtttttaatcgtgtcagaatttgagctggaaaatggctacagttccttccttccttcctccctccctccctccctccctccctctctctctctctctctctttcttactttttgagatggagtttcactcttgttgcccaggctggagtgcaatggcacaatcttggctcactgcaacctctgcctcctgggttcaagcaattcttctgcctcagcctcccaagtagctgggattacaggtgcacaccaatatgcctggctacttttttgtatttttagtagagacggggttttgccatgttggtcaggctggtctcgaactcctgccctctggtgatccacccgcctcggccttccaaagtgctgggattacatgcatgagccaccacacccagcctacagtttcagatagttttggttcacttttaaattcaagtctgtcaggatcttgaatcctatcatcacgagaatgcattaaactacaatccgtttactaactctttcttcactattgcttactcagcagtgagaaaggggagcatgtggggcaggaaaatatctgagatgagtaatctgttcttgtatttggagctcttccaaactcctgccagctcacactgttgtctagggcccagctgatttccctggtcctctaaaagtctctgtatttatggcaggtttgcttacgtttagcccaagtgccttctcccaagcatggaagatgctatgagtttgtttctgtctagaaatcagttcatcaaggcagcagagaaatttggttggaatgggtgccctgaaattcagttttgtgtcaccaattgtgggtatccattaggaaccactggaggcaaactgaaataaatcctcctctctcaaggaggcggtgttactcctggacctggcaggatgctcatgtgagtatgtccagcaaaccaaccactaacaatcccaaagataacaatttcttatactcacacggtgctttgtgtttaacaaggcatgtccatgcccatgggtctcctttgattctcacaataactcagttttagtatgagggaagactgggaaagtccagtgggccagtttgggagtggccttgaatgtcatccttgagactttgaactttagtccatattctgccattcgcctcctttcatccagatcactgcagcggtctcattgcaagcctccctgcctccaggcctgacccctccatccatccgccacaccgaatgaacaatctaaaaggcaaacttccccttgccaaaccctcctgctctgtactcttcagtggctccccactgctttcagaacaaatctacaaagctcttgagatctggcctctttccacttctccagtctcatttttcccctcctgcttctccctactttcttcttcagctgcactaaacattcttcaattccttcactgaatcttgctccatcaagcatatatgcattgctatatacttttccacattgttcacacacacacacacacgcacacacacacacacacacactcacactcactcatgtctgctcatccataaggtcaaagccgcagagtgacctcttttccatgcctcctctggacctgcaggccccgagcttgcttccagctcatcacctggctcactgggctgggattgctccagcatttgcttccctactagaatgaaagctgtgggagggcagagattgtccatcttgcacacccttgagcctctagcaccaagcacagtgtctacacataacaagcactccatcaatgctcattgcattgaataggacccaggaagctacagactgcttgttctgctatatatcctgccagttgtttaagaggtcagctcatgagtacttactatctctcatagcctaggtctgggccgaaatgcagggtcagatgagaggctgctgaaatagaatatgaacagtgctcacatttatcaagtgcttcacttgcgctgtcccatgtaaccttcacacaaccctgcacatttggtgctattattagcattcccattttggagatgagaaaacaaaggcatggaggggtgggcaatttgtccaaagtcacaaagttcaaaagtggtgactctggggttcagtccaggcactgtgatgccagagattctcacctctaactactatgcaacaggaacactgacctccagaagcttccgggctggtttttgagacaagatagagatgccaccataggatcccaaatgcaggggatacccagagaagggaagaagtgtgacccactgcagtctcagaaaccctgagatggtgacaagcactgggagggcaatgtagaggcttttagggaacctggataccccagacccccagaagaggggtcccccaatttcgctgtgacctcagggcaggaagcaatgctgaagccaagctgccactatgggccagagactcccgagagcccggaatggaaaacagtgcgactaaatgtcagggtttcgggccccagccaggcctggctgccctataccgagctctatcctcctgccctggaaggaagagcagggagagattccacaggagccctcaggagagcttccgaaaagggcccccctgccagggagcagggagaagcgggcgtgctggcggccaggtcggggcggggcagcctgggtctgtgtggggtggccggcagccgggccacccggacacctctgacaggcaatttccaatttcctatggaattaaagtgtaaaagcagagagtccgtcactgtctgctgcctccctgggaggggagagagttactgctgcaggcttgaaaaagctgaactgtcctttcccaaacaaaacagcaaccaaggaagttggtggtgggaggatggcttcagggctccaagctggaagtcaggatgcaggctcttctgtctctacctgcttggatgaccttgggcaagtcccttcttgtctctgggcctcagtttcttcatctacgtgaggaggcattggacaagaggatgccggaggccccttccagctctgagaggccagcatttggtaataaggttgggtgtgggaaaagatgaggtcttgggggagagggggaaggggctggaatcatcgtgggttggaacagttaaaggaacctctgttcagccccagccccaaggctcccaaacccagcagcagaactgggatccacccaaccaaaatcagcgagggaaagccaaaagcatgagtaaggagaggttgggccataaacatgtcatctgcacaaacatccagccccctctggggtcccattggccctgctggagggaggaggctgctattggggccccctcagccacaaccccaagcctactcgcttggcctgggactccagggtggaggcctgattgcttagaagggaaacctggctgtggacatgccccaaggagctgtcaggaaggggctggtggtggctctcagcggaagggaggctttccatgctgatatcaaacaggattttctgggatggtctccatttcaggtctgctggggctcctgcttctccagtcctgaccattccccaaagctctggaaagaagagcagccactggaccttgatctgtgggtcttcacaggcattgtaaacacagtattccccaacacgactctttgttcttccaaactgtcttcctctgtggggttcctggcttagggatggtactaccacctagtcccccaagcgggtgtttcagaagtgatccttgttcctctttctccctctccatccacatctaagatgtggcatgtgccatatcctgacaacctgactctttgtgcacttccattggactgtttctctctctcaatctccctctccttttctggacctgaagtatatacaatccaactaattataatccagttttcaaatggcttgctttttaaatttccttattttttaataacaaaacaaaagctagaaccatgacaataacctgcgttcaccatgcatgattctccaccccatctccttgccctccgccttccgagggagccatcatcctatgtcttgtgtctattgctctgttgcttcctgttgataaaatcttactttatgtatctgtactcctaaagtctaattttataaatgggtattctgtatgtaatcttttggaatttactttttgcaagtgtagtagatcatttccaaatatggctgcaattattcctcttcccgcctccacatcccttttgcaacatgacttcgaagttccttccatcaagaggtggagtctatttccccacctctcaaatctgggctgggctgatgtatgttttgactaatataatacggtggaagtggaattgtgccagttctgagcttaagcctttggaggatctgtgctcttccatattttcctggaaacttttgaacaagtctgggctggcttgctggatgaggactgacatgtggcccaattgccaccattgtctcagccaacaaccagtcaactctcagaagcagtgccccctagctgactctctgctgaccctggactcatgaggaagcccagccaaaaccagaactgtccagctgagcccagcctagaatacctacccactgaattctgaatcaaataagtaattgtttaagctattaagtttggagtggtttgttacacagcaatcaccagctgttacaccaagattcagtcttttgttgcatgctgctatggctcattcattttcatggctgtgtaatattccacagtgtacatatggtttattggtccactttgctattgatgggcatttgtgtttttgatattgtgaaaatcgctccgtgaactttttttatacctgtcctctatcgaatgtgtgcaagagattcctggtcctctctaacctcacagctactagaaaccttgagtcaattcccctgactatcccagaagaaatgatcaaaaatgaaaatcacatcacgacattcccctgctcaaaatcctttagtggctctcctccagcacgagggtagagtccagcatctttactcaatatttaaggctctctgtggccgggtcagtgctggcacctctagccttaacgtctctttgacaacaagctctaccactaaaaatctgtgagacgttggacaaattccttcccttctttgtgcctcagttttctcttcgaaaaatgagactagagacacactaaggtgggcgtattactgagttaacccttacaaagctttaagacagtgcttggagcaaagcatcccacaaatatttgctcttattgttgttcttactgttgtggtaaatggagtgaaatggtaaggctgatgtttcccagagtacatcacccctcagaacctttgcccatgtctgtccctctgctcagaaagcctgctctctccctgcttacctggcagccttgcctgctcagccctgtcctagtgtcactccgtgtctttcctgctgattccccactgcccagaagaactgacctcaccttttcctaccccattggcccctgcatgcatggctatcaccgctcatgtttgtttactgggcctccttgagggcagggatgatggcccattcatttctgtatcccagggtctcaaggagcctggcacagataaattcatgataaatgcattgtcagtgaataagtgaattaccgaccttcttttccctgagcagtcattcattcatcattcattcaaccaccatttacagagtcagctccatgccaggcactgctttggctaagtggagacctctgcctgcaggatctcctggtctgtggggagagacagatccccgtgcggatgggtacgtctcagtgcagtccaggctgccacatgggagccccctacccagaacgagcagagagagccctcaaagagcctaccatcaccaagggaaaggagatttagacctgagacaaagacaaagctgcccaagcatttggggtatttgagattctgattatgcacaggacgggagtttagagagccacagagctgcccaatgggccggaagctgctggctgcaggatctgggaatgcaggtgccatcttgctcaccttgaagcccagctcagccagggtctggcacagagggggtggtcagcataaatgtttgttggatacataataaatgaggagaggaaatctaactaaataagaactgcatttcagccccactctgccacataccggtcagtgactacggccaggacacatcccctgtctggcctcagatattttccaacatcctctccaactctcacattctatgatgatgcagagaggcagcctggaccctcagggtgctcctggactgactgtgcgcgtgtgtatgtgagtgtgcgtgcacacgcagcacatggaggatctggatgtaggaacaagcgcaaaatatgataattatcattttgggaacacttgttctgtgccaggcacaggatgcaaaggtctaagtgcttcacgtgtattgcttcattttcctcttactcaaactgcacaacacgggtgatgttgttaccaccaacccaaactgtacaaaacgggggatgttattatccccattttacagctagggaaacggaggctcctgagttggaataaatactcccacagatggtcagtggcagatgtgggattcaaagcaagatctgttggactccaagctcttagctgctacactccagggcctcccacgggagtgtgccctccgactccagggtgcatgtctttctgccacttgagggcaacttttggtgacagaacctggctgagaattcagagatgaccgaggccaaggctggggggagctgggggtgggtgagtgaagggcgttcagcttcactgcctctccacgcctctgttaactgcagccaaatcccccatgtgaaagacctggcttgggctttcctgggcttgcatgcgagtttttgctttgctcaaccaaagggcttcctgcggtgctctggactgttctttctggccaggctaagggagggcagaggtcagcggaggccctgcctttggctcaccctcccagagggtggattcccagcaagtctgagagatcctggaatggtctctcggcatacaggcgggagtactgggatatttgttcccccggacacagctccctccctcatgtgccacagagcagcttagagggagcagcttagcactggaaacccagccatgggaaaggctgctacaggctggcctttgaaagggagttctctttcttcaagtgcttaggggagaaaataagtgagaaaaagagagatagaggaaggaaggaaggaaggaaggaaggaaggaaggaaggaaggaaggaagaagaagaaaaggaaacgaaaaggaaaggaaaggaagaaaggagagaaaaattgaccatactaggggtctggtctgttgagtcaaatttcctgatgggctcatccctaatgatgcctgaaatggaggccactgtggggctgttcttgcaaatgtacttagtggatggatcgtggcctcttgtgcagctgcaagctccctattccaaggccccaactcaacaggtccgatgctgattccaaatagagtcaccctggctgggagggcctttctgggtccccagggaaagatttggatggtggggacctaagatgctgcagctgaagctcctgcccttccaggagggcagggcagtgtcagggagcctcagggccttccttgcaggttcaggggcctcagggggaacatcgcatggctcttcagagactgtccctggaagtgacctgaactccagggactcaggccagaagcagcctcttttgcacacgcccctgcccctctagtgaggtgtgggagtgggtggggaaaagccttgctcatccaggcctttggaaacatcccgacacactttcctccaggcaggccgaagttattttccaagtatttcactttccatttcttctccagatctggtaacagggtgttcctgccctcttccccttcctgacccttctgcctgggccccgcccctgctgcgtttcatcaagtcgacatgctctaagaaagccggccaaatctgcactcagccccacggatggcgcagatgtgtgtgaccagcccccctcggcctgcagaagcttaccatcgagcctaggggacagctatccagagggaaacaggcaccgggggctcagtgggtcatgggctttgaggtctggcttctctactgtgttaccctgggaaagtgtcttgagctctctgagtctctacgtgctcatctgtgaaatgggggttaccctatctcccttggaatgttgtgaggttcagagtggacaatgaatgtgcttgcagtccagtgcacatctgggttcatactggggacccaatgcagctttctgacttaactttcggaggtggaagtcaactgttggagatcgctctcttagggacagcctttttgtgtctttctaggtatgcagaagcagtccaggcagtacaatcagccaaaactgattatgaattctggttatacagcttcccagctggggaaccttgagcaattcatccacctctctgggccccggttatgaataaaatataaaagaaaatgcaggtaaaatgccctcttcctcaagggaatgccctctttctcaaggggttgaggtcaggattaagtggcataatgcaagcccttggcacagtgcttagctcgagggatggtgacaaatagtcatgactcttctttgatggctcagtttccagctgctctccctgagatgccatgggaggttcttggctgggaagccaactgtttctttgtctaagagggagaagatgctatacatcttgctctcacttaaccctgctccctcccactcaccaccaccctttttctttttccaggccacatgagttttgcagagcagacgtagaaagcagagaatgaaaaaaagaaaaagaggagagatctgaagccagaatgggcgtcatgcaagaggctctagagttgcagacagttgcagcccagatacgacgtgcaaagagagacatcccagatctcccacacagaactccggcgcgctttgaagtgttgacaacacataaaattaaaagcatcacaatgcgaattatcacgttgttttttccactttgatagcctctacaaagcattttataccgatgaatcaatacaaatgtctctttataaagacattggaaacaaaaagatacatttttttttttccttaagagaaaccgacacaactaacaaaaagatttcagccctggcttgcaggatagctctaggtaacatagtgagtttgtctctccttttcacagtggccttggaggtcactgctgtctacttgcttgggtcaatcattcagcctccggatgaatgttctgcctgctgattagtcagcaccatgagatgagacaaacaagccacaattgcattgctattgcctcctgactgcacacacatgtgtgtgcacatgtataagaatatatacagtgtgtgtaaatatatagaggcgtgtgtgtgtgtgtgtgtgtattttgtggtttggtaaaataaagcttgcaaattaggattaatttataactcgttataattggattattggctgggactccctttatgttacagcagatggacttttgcgtgaaatattttccctgagttgctatagagatgtgccaagatctctctgctgaagtgattccccgcaggcctgtttgttgttgtgcccggtgccgaatcacttgcaggctgaatcacttacagccctcacagaggctgatgaaagagccccgggaccctgggagtctccagcctctcagctactgccaccagagatgggctgcaaaagtcattagagctagactggggggtgggtggctgagctggtgggtggagggggatgtccaggtgagccaggcagccacaggggagagggctgctgtgggcaagaaagataactcaggctaatcaaagacctactgtatggccaggcacagtggctcacacctgtaatcccagccttttgggaggccgagatgggtgaatggcttgaggccaggagtttgagaccagcctggccaacatggtgaaaccccgtttctactcaaaatacaaaaatcagctgggcgtggtggcacacacctgtaatcccagctactcgggaggctgagacaggagaatggcttgaacctgggaggtggaggctgcagcgagctgagattgcaccactgcactccagcctgggcgacagagccagattccatctcaaaaaaaaaaaaaaaaaaaaaaaaaaaaaaagcctactgtagctagatgtagttctaggaacatgtagacattccatttatctgtctagttcctgtagcaagcctatgaggggagtcctgtttttcccacttttcaggtggggaaaaggaggcacagaagagtgaagctgttttctcaagctaccactgcagtgatcttagcaatggtgtctccccaaaatgggggtgaggtgggatagatggggtacatttaaacatagggttctgggagaactgagaagccacaggctgggcggggtagccaaatttagccctctgccagttcctctggctgtcggaggatcctcagacaaaaccgccaaactccatcacgcaactcacagtccatttgggcagacacactcaggcctgtctgatgagcaacataaacatggccaagcgcctcatgagacgctgtgggtcctgactcttgaaccagaggctgagtatgggggccccaactccccgatttccatctcaggcaaagatgtgaatcaggcaatgtttccagagagcagagtttacaaaaagtgtggcctggagtgatgacaaaggcatgggctttgaagtcagacagacccaagttagaatcttgaatctacccttgtccagagctgtgacttttctcatctgtaaaatgggattcattgtacttacctggcagagttaggctcagctctcccagtagaatggaagctctctagaacagtgcctggcgcacagtagaccctgtgaaatacacattgaataaatgagtatgtttttagtatatctggcatgtcataggtcttactagatggtagaaattatttcaatctggcacttttagactttggagcccattttcttctttcatattgttagcttcccttcctgggcagtgtcaagatcctgagtccttgcgtctcttccccagcccctaccaacccatgtagacaggattcttggagactacaaactgcccaacgtgttaaccagtatctcagtccatggagatctcttcctaggatagcacgttagtcaggactctttagatggcaaggacagacactaactcaatctgtcttaataaatgaacaaaggaacttactaataggagtaaatggcttcaggtatggctgaatccagctgcccagctaatctctttacatttcttaaatttattctctttcagtttgaatccaccttcaggcaggctctgcccttgtgatggtaggatggcggcccagcttcaggactacctctcaccagctcagcaccttaacaaaaagagaactcctgcccaacagcttaaatacaagccctaggactgcattttattgaatgtattatataacgtattatataatacttgggtcacatgccaagccatatcatgtatccatcctggaaacctggaggtggagtcaaccccacctaaatcaacatggtctgagaacggggaaggagcagttctccaagggcaaggcggaggttcttgacagaagaggagagagacgctgagtagatgagaacagccaacatctaccacagagcggaaaacaacaaacttggttctcatgacaagcccaaaaggtagttatgattcttctcattttgcagaaaacagaagcacagagagtctggggaccctgcccaagaccacatagtgtgtcagtggcagattcaggctgggaatccctaagcctgtgttcttgccaggactttacagaaggaagtgagcctcgcagcaggtcatgaactagcagctggaagatacgtgaaagatacagatgggctcagaatcccagctccacaaggggaagcttctgggcccatgcaggactgtttgtggttcttgccctcatctgtgccgagtagcacaagtctcaacataactaggtgcttgcttttcttcatctttccaaaatcccagagcatgttgttggtcatgtttgcaaatcttataagcaacttataattttattttgattgtctcaagtcagaaataatttgaccttggcattattgagaatcctattttcaaacttttttttttttttcagactccttggtggttctatctatttggagaagcctttatatcttcacacacctgggatcttccaagaaggttttggatgagcacgcctcaattcagtcctagagacctatgctgcatttgtttccttccctcttggtccacctccagccctcattcaattctaagtctcatcatgcctttgaagactgccctgctagtctcaaacctgtgctttttcctttgttcaattgtgaccctgtttatgatgctacagaaagaacagctttgcatactccagacttggttccaggtgtctgcactcataatttatgttgcccttcaatttacctatagaatcttgccttttaagaactggttccacataaagtttctaaggggcttttaaaactgtaaagcaatataaatgatagatgttataaaatctaagatcatttgtccatgttattctctacctgttggttccttcctcattgaaaattggtgtatagatggtagatagatagatgatagatagataggtagatagatagatagatagatagatagatagatagatagatagatagatagatttttatttttggtctatctcctttactaaacagtaagctccatgaaaatatggatcatcactgtcttattcaccattatattctcagcatatggtattgtcctggtatagaatagattctcaataaatgcttgctaaatgaatgcattcatgagtgagtgaatgaatgaatatgcgagtggatgagtgtgtggaaaacatggtctggctttcccaaccagatgagaaagcaaaggcaccggagttagcttcagctgttgcttcctagcgatgtgaccttagtttgacctttctgtgtttcagttttctcatccttgaaatggggaaaatactttactgaggacaccaaaagatcacctatgtgaattcaatgtttgatatactaagcactcaataaatatcagcactcttctctctgcccttcttggagattccataatgcctacaatggtggtcaaatactgagtgtttagtgagtactttttgatggatagttggataagtttatcagagtgatggtggccacatgttgggtgtgggatttccattctggcttgagagaaaactgtgagatgtgtaactgaaccaagaattcaggtaagcactgggcatcataagaagttggaatggggaggtcggtcgggtctgtgtgcgtgtgcttgtgtgtgcatgtgtgcatgtggatatggggagaggtgtgcaaggagaggacacagttatccaaagtccactgattctagttcagaatttaaaaagttaaattctaaaaagtttaagttgagaattaaacaggtacctggcagcccctggaaattcttaagaaggaaaaatatagtggaaattcttttagcatctgcatgaaggacagacttgagcaaggagaggctgcaaagcctgttctagtaatccaggaaaaagagagaaaggactggtaggtattcaataaaccattttgacatgaaaggtaaggtgaggcgagtcttgaagactcctcggatccataaatcaagaaatcttttttgggtatggagcaaatgagaagaagggtccaaattagtttttatttttccttctaaaattatgtgtgaatttttttattacaaaataatacagctccactataagatataattagaaaatgaaagaaaaaataatcacccataatcctgtaaccagaacaccactgtgacttcattttatgaccccaaatctatgaccttaggagaatgaatgagtctgctgtgttcatgatgggaacatagagaaaggctcagaagaatgttaaagagaggccattgctgagctcacttgctcatttgcttatttgattcaacccataagggagacctcaatagcaaaaaccacatcttgacattgtgttggaatctgccagcctctttatgcaactctggatgtcaacaatgtcaggttacctccaacatgatcaccagggtcctctccattccctaccatatagtaagcattttagtctagtttagtttttaatctttttttgcatctgcatgtaatcttcttttgggagcattcctcgctgtgtgtagtcctggcaatctgaattctttctgatatgtgtgtaggtcaatggttgcttgccctgtccatctgctagatgaccccctcctttccatattctcctgttagtgtctgggaaggttggttcatcagcctgttggtctgtaggtcagctggctaaccagatttgggggaggcagacaggttagccttacgatccactgactcactgacaaaccgatccatcggtcaatccgttggtctgctggctggccattagtccaactgtccatctattggacagtcagtcccttcattggtgtatcaaccatgccattggctcaaccatcccttggttatttcaccaacctgtcagcccatgggtcagtctctccatgagcttgctggccggttagctcctcagtcagtcagtaagcctgtcagttgccagtcgggctacacccctgatgaacccctccagctactgatctcagtcctcacctgagcgggcagggcatggagggagaagctcattccctctccgatgaggtcgtttgaagtgctctgtcaattctttggaaactttaaatcaaaagttatttatgaggtaccagagtaaaaacagcctcgtcattgtaaattactagcagccaacttgaattcgctcattttcttttaaaattttaaaatatttagaaccctggtttttctccttgtctccgctcccactccctgggactgccccctcctcctctgtcatttgagggattggttttcaggagcatgtgacttcatcaactgctcctgatgccaaccagaggtgccaaggtccatgaagagatgagtcacccagctgggagaggaggctatggggagccaggcaggtgcccagaccctgggccttggggttctgcttacgtgtttgtgaccccaaaagtaaggcagtagaccagaccatggggcccttttccacttggaggcccctctcagacacggtagaactggacagatgattctccagggatccagcaaagagggttaaggagctgttttcctgtggactctccttgctttctgggggtggggggaggcagagtctctttaatcttcagagcaaacttcctaatgactgagagagcaggcagcatcctgagtgccaggacgcctgggttccagcccagcccatggccaagagcagaggaagaagctagctcttgaccaccgcctgcctccccactgagccactctctttccaggtttcttatgaccacttccctccctcatctccatctcaggctgtctgagtgctcctcaactaatctccaagaactgaccccgtgcatgggattgagctgccaagttaaattcactaacaggcatttactcgctgcttattcaggtcaggatctcctgtcctctccttcaaaggggcacacactttcattatttaggtaccaaatatttattgaatacttgctgcctcaaagcactgggctaggtctgaagatacagcgttaagtaaagcaggcattgtccttgccttcctggagattagagtcttggcagatttacgcattaatgaaataatggcacaaaaaggtgttgaatctactgagatagacgatttgacggaaaacaccagtggtctaggaggaagactgtaacaaggcttaatctggtgggactttgggaggtcaggggcttctctaggtatatgattgagtatgaagatgaacagttattaaggtaaagggaaagccaggcacagtggctcatgcctgtaatcccagcacttcaggaggctgaggcaggaggatcgcttgagcccaagaattcggtagcagcctgggtaacatggcaagaccccgtctctacaaaaaatgaaaaataaaaaaattagccaggcatggtggtatgcatctgtagtttccactacacaggaggctgaagtgggaggatcacttgagccaagtaggtcgaggctgcagtgagccatgattgagacactgtgttccagcctgggcaacagagcaagatcttgtctcaaaaaaaaaaaaaaaaaaaaagtaagtggaggaatgatcatctcaggagagggtacagcacatgccaagtccctatagagggagggagcctggaacatcaaggcagccaaagaaagctccttgcagctgttgacagagagtgtgggaagataagcacatagacagacaggcaggagcttcctttgttcgttcattgttatgttcattcattcatgcacacatgcattacacctgcattaattttctcattcattcctgcattcattcaacaaatacttactggatgcctactctatgtctgccactctctcagagctcggtgactgcaagcaacagaaaccaggactggataacagtgctggctgggtagccattggaaggatgctgaagaaccacaaaattggtgggatgtaggaggagcaggcttagaaaagaaggttgtctggcatctcaggcatctccaggaaccatagcaaccatcttgctgcaggtcctataaagtcagccactgctgcaatgatgagtgtcctcttgccattctcccttttctgtggtatgaagatgcaaagttttagaaggaggttccctctggctgtcatatacttgcctcctaccataccaggcctacaaaataaaggatatagtccgttggctttcttaatggttagccagcccctgggtttccaccaagactccatgcaaagggggagtggtgattctctgagggatttagggtactcatacagaggataaataaatgtttggtagccccaagttacctatagttcattacaacttttgagtcctaatggtcaaactaggagctcccacagccttcctggcaatggttctcctttggaattctgggtactatgtgatctctgatgctaacacaaaaaaacagctttttgcacatatctaggtgtgtggctttttttttttaacctggtgtttgagttgctccctaaggtattttctgatgacatccttgccccctctcaggtattatatttgcgggtgtggtggtggtgagggtatggccacccaggaactggtgctagaggcaggatttggacccaggcttagctggctccaaagccagtgctctttccactacaatcctcagccttcagaaaaccagccctgccccgatccttaagaggtgggtcttcatagtctcagcgataagcaggtgcgggtaaccccaggaacacactctgacggtctctactatgtctttaggcacaagcttcacagccaaggcctcggggtcttcgcttatgaaacaggcatgaaaatcttccctttggcacctctcagtgtcaaggtgagaatatagcaatttgatgtctgttgagaatctttcggcaggtcaaagctcagaattgtcatggctcccctgagctcagaggctgcaaatagttgagtaagatgaggctcatgtaggaggcagcaaacctgtacttagtggacaggaaggggaggtgtgcctggctttgtcctctttgttagtggagaggggggtaggggcagtcacaaggcagaggaacccccttccctgtggaatctggttagggtgcttgcacagggaagagacggtcctttctttgtgagaagcagaggtaggagggagctgcttagggtgtcttcttagtgcaaggagagtttcatcttaaggaccattcctttcaccaatccccaaacgtcagtttgctgattaaatcacacgagcgagcatgcgtgtacacacacgtgtgcatgtggcagggcagcaggtggatgtaggggtaggactgactcaatacgcatggaaatcagacatgcctttgagcaggtctgctgaactgggcgtacggacccaccagacatgacgtacaggagcgatgaggagtttcctggagagaataagaacttaagaaggagttgggcatagagggctgacctgggaggtcccaagaagggcacaggtatgactccttggatttgtccccagcccaagtccgtggcttcatatctgggttcagcaacaagctagcagcaggctgtgtgggtagaatgggaagttctgtaatacactgggcccaggaagccctgctgtaggactcaaagagggagagggccattctccccattgttgccatgaaatctccatgaaagtttggcatccgcaaggtttcagtgcagctgccataggagacaggggtgcagccagggcgctgtggaggagacgtgttcacaggcacagaaggatggtcctggggatctttgggtaggaatggtttattttactagatgccctggggggactcattttctactgactatgtacgatgtgccagacgttttctctcacattgccttctctgtgacactttctctaaccttcctacttcccttttttctcttctcctcttctgaatttatacccatccttcatctgtccatccattcatccatctatccatccatccatccacccatccaccctctcagcaaaagagaaacacttagtggtgatatgtcatagtttattaaccacttccctattgagggaagctt

SEQ ID NO: 13 - DNA, 191797 bp, Homo sapiens
gaattcctgtgtatatttagtggggtctgatgagaaagagcctaaacgctggctgatttgggaaaggtctgatagagaaaaaggcacacgtaccctgactgttccttcagctccagccaactctctaagaggaaattgtcgggcagtgggggagagctagttgcagaaagaaactgtaaaccagaccaggtgtggagagggaggtaatagaagggttatagggtaggggagcagaggctgaagaagagttggagcctgattcagcctggcagggagcgacttgaggaggagcagtctgggaaggaagtgagaggtcagatgggtcagtagaaaaggaagattcacaagactcagcgatgcttggggttgggactgaagggacaggtgggagggaaagaaggaggatttgggacaagttgcattgggaacagagactagggagggaacgaagtgtgaaaaatgcctggacgtagggcatctcagactatttgcccatttttcgacaaaaattatctaggtctcgtaggatggagaaatcaaaagtgccgttttctggccatttagaaccattgtcgagtttgtactggggccaagcagtgatgcagaagaaaataagatgcttagattttaggtcaggcaagagttgaagaggttttaagttcttgagaacacaggctaaggagaagaaggaggaatggagggtggaagtttgcccatagtgaaggaggcaagtttaaagagaagggtagatatggcgaagccggtggggagcaaccctgggctgcaatgtgggtgagcagccaaagcaggcatccctgcaattgacttgccaccaagggaatatgggtaaatgaccaaggcaggagtccctgtggtgatcagacaccagtggaatatgggtgaataatcaggcaggcatccctgcaatgattaaacaccaagggaagactgtcttcctgaatctgtgaccggtgccggagttttgggtacacagataaaatgtgtctcctttgtctgtactagagagggaaaagatctggaattggaaggacagggagattgaagggtagcgagagaggctggagaagagagtgaaaagaccgcttactcgaaattggtgagatgttccttgggctggttggtctgaggacccgaggtcataggtggatctcttcacggagtgagggtgaggacaggggactggtctcccaaaggagtccctctgacccgggtctttggcaccaaatgtcacggacgtccgtgtgaagagatcaccaaacaggctttgtgtgagcaacaagactgtttatttcacctgggtgcaggcaggctgagtctgaaaagagagtcagcaaagcatggtgggattatcattagttcttacaggttttgggataggcagtggagttaggagcaatgttttgcgggtagggggtgaatctcacaaagtacattctcaagggtggggagaattacaaagaaccttcttaagggtggggaagattacaaagtacattcatcagttacggtggggcaaaaacaaatcacaagggtggaatgtcatcagttaaggctattttcatttcttttgtggatcttcagttgcttcaggccatctggatgtatacaggcaggtcacaggggatatgatggcttagattgggctcagaggcctgacatactgaccttatgttttcaattaaatgtaccacctttctttactgttaccacatttgtaagcgtgttttgatgactattaaatatagatgcttcccaattttctatagtgctccttttcaatttgtataatttacaggttattaaatggcattacttatttatttggcactgctaaatgttcatttcaatgccatggcttgggcatgttatctccaagctatttaatgaggaagacagagtcaagagacttcctgcctcattttgtccctgccactaaggctgcaccttgtagtggaaatcattttggctttgaaatctgaacttgatttcagtgccaatctttatcacttagtaggtttgtgacagttaagcaatttacctaacttttctgcatgtcagtttccctaaataaaacactgctggactgtttgagggttagagataataaatataaagagtgtcaaacaagattggtgttctctaaatcatagctattaacattgctttacttgtaactttgggtaagttgcttataatctaaatcttagatttacttcatgtaaaatgaaaggattgaattggattggtataaatgggtcttaggacccttgaggtaatatacagatatttttattttgtacacttttgtgaggtttgtagtgttcatcagattcataaagtgatttgtaaatcccctgaataaaagggtaaattctaaactaggtgatctccaagttcttttcttatgataaaattttctacctataggctacatagtcaacttcagtgtgactgaggttagggaaattatttttgaaaaattttttgaatcaggacctcagaatgtaaatgtttgttgctgttaaaagtaattattatagtcttctagcttttggtaactgatggaaacacttgtatcaagtaaccatcttgctgataacaattataacctctggacaaaacattaaagaaaaagaaacactgtttgaaggcactggagagtgatcaaaagtaggtaggaattggaggtaagatgcacctttatggaaaggaaccaaactggttgaggtctacatttatctgacttattctttaaataaatgcacaagtttatgcagtatatgggaatacagctcaagcagaaatcagccctctttttgatgagttagaggatgatatttagggcaatgaaagcaggtgaaaaattgagagtgatcccagaaaggaaggagccacaaagtgagggaacccccaaatttgtatgcaggtttcccccacaaccatgcgggacaagattccaggaaacccagaggcaatgaaggaacaataggcagaaagcttaaagaattaaagagagatcttagcagttgctggagatggactttagagttcccaccctgctaaaatagaggaacttggtaaatgcctcaggcttgctacggaaaacctgaaatggccacacacagtatggatcttatcctatgattaagatcttcacgataaaaccaaagccaaactgaaatagctatcaatatgttctaacctttaagcaagcccttacaggttaaggtgatcctccattaattcagttgtctgtaagaataaaattcattattttctggaggaagctaatacaatacagagttccaagattatatgaagtgcccagccagaaattaatagacaagtgaggaaataaggaaaggcaactcattggaaaaaaatctgcagaaagagaccagcagttcactcagatgctggattactagacaggtaccttaactataataaatatgctaaaaaatctaagggggaaaaatgaggaaattcccctatcccccacaaaaaaccagtatcaggaatgaaagagggtacatcagtatagatcctatagatgttaaaaggattattagggagtcttatgaataagtttataccagtaaatttgacaacttagagaaaaatgacaaaatcttttaaaaacagaacttatcaaaactagtaagagaagaaatggaaacttgtaagtgggtttacattttaataaaaggaattgtaatacgtaatttaaaatcttcatacaaaggaaattgcaggcccacaggatttcactgacgaattctatcaaacattggaggaaaaaataataccactcttacataaacattcagaaaaaagaggaagagaagaacttcccagtttcttttatgagtctaatctaactaatacaaaaacctgacaagggcatttccaaaaaagattgcagactaacatctctcatgagcacaaatacaaaaattcccaataattttaaactttacccaaattactaggtttcaaaaagaattcattagtttttaagattaattcaactaacagtagatattgtactgcttgtatttgcttagtttgccatcacataagaatgtgaataaatattgatgttattatccaatttattatcagaaatgaccaggtatcatatgaggataaccaactagtatgttttttggcctatatagtctcccttagtacttgtataatgggtagttattcgttctgttcttttttttaatatgtgtttaaaaggaattgaattttaacccatttttcatgataattatggaaaattattttttccaatgacatattttggaaactttcaaacccacagaaaacttaataatttaacaaatgccttcatactgtgcattttgccacatttgttttacctctctctttctacatctatatatacatttatgcatacatatgatatataacctttttttggtaaaccatttgaaaataagttacataacatcatgagagttaacccctagtattttttatatacctcctgagaacaagaatattctcatacacaaacgcaatactatgattacactcaaatgttgtaatgatataggaatattatttaatacatagttcctagttgtttctcgtttgtcccagtaatgtcctatataactttaaaaaaaatatctgaaccggacatgcattggatttaatgtctctttaatctaacatcgttttgctaccttttatgttttttcatgattttaacatttttgaaaagtccaagccactgttttgtagaaagtcgtactatttgagctattctggttattgcctcagtaatatatttgtttaaacaaataatatatttgtttaaacaaattatattatttgtttaaacgaatatattgtttgtttatttgtttaaacaaataatacatttgtttaaacaaataatataatttgtttaaacaaatatatttgccaagaatactgtgtggctgaggaaagataattcttaataaattgttttgcaaaaagagcacttcagagcaatgaactatggagcaaaaggcaaaatgacggaaacagcaaccttaagttcatatggttatcctggagatactgattctgcattgcattgtcgttgcttgcttttcatttagctggtcttacatgaaggaaatgaactgatatttagtatttatccaaggtaaaattctatagctgtttttgaattgccagtctttttggtttacataagcccttgctgaaaacgaaaaatctgctgcctggaatctatatattatagttattgtacatttcctaggattcttttgagaaaactaattttgatcaagattctcactctttactgagaagaatcattgggcaaagtatctcttcatcttttaagaagtttgcttctcataagttaaagtagaaattgttaaatagtcaattgaaacattttcagtggtcatacccaaagagaaagtaataacagtattatttcttgtttaagtcattatttgctgttcctttttcagttacctcataattttcatgacagttttaataggtagaaataattactttctaacttggactttttctacaagttgaatattttcttttagttgagaagtttaaagtatacttttaaaaacaaatgtatatggttgcttgcagatacgatcaaatcacagaatagttacattttaattccttctatcatacattttaatttctcctgtcgtgttaagatagtctgtatagcttcattgttcatctgtcagcttttcagttaacccaaatgaggaaacagtcactttttgaaagatatttagaagctttgaatgtctagtttgactttagagttaaatctcagaagacatattgcattgagtgtatgtgtacgttcagcttagaactgccttacactgctgcaataatactgatgcacatttagttgatactgcttacagttccttatgaacttgttcagagcagttcccagaactcaaggataatctcaacattcatcacccaccatatggcccaaactgctgctttcagcccaacttccagccttcgtggagcatcagactgaagcagagctctcaactattggacttctaactgtgatccagccgactttcctattgagaaaccacatagcccctttattggttactacctcatctttttttcttgttcataaccagtcttcttagaaatgttgtctgtaccacttgtctccatgccctcatcaactgctcatttctcagcctgttctagatatttttttaacatactagtatcaggttgttgcagcactattagttgaaaaggctatcctttcttccatttaattatcttggccttttttgaggaaatcaattaactatatatgtgtagatctttttctgaactctctattttgtcccattgatctttaagcctatcctatcccaatatttggattactgtagcttctaataagtcttgaagtcagatagtgtttaaacctccaaattcgatattcttttttaaaaatggctttggctattttagttttgtgcctctccatgcaaattttagaattaacacatgcatttctacaaaaaatagaagagtatggtgtttattggaattgcactgaagttacagatcaatttgtcttaaaatttgacattttaagaatattgagggtttttgtattcttcctgattctctttgtacttggttctctcagttgttgagggagaagtcttaaagtgtctcttactatggatttatcttctcacacttctatacagtttcactttatatattttgaaactctgttgttaagtccacaaatttttatatccttgatgaattgacctctttattattttgaaaagaccctctttattcatgctaatattctttgctccaaaatctactttgtttgatattaatatagcaacttctattttcttttgattaatgttggcatggtatatctttttttcatttttttatctttaacctatctatgtctttatataaatagggtggtaggcagcatatgattcagccttctttctttctttatcctagatgaaaatctctaccttttaattgagctgtatagaccatttacatgtactgcaattattagtatgcttggatttaatctactgttttccctttttatctgttttattcaatggatttttgcctttctttggatcgaacatttagtatttatctccctttttgaacttactagctataactattttattattttgttagttatgctttagggtttatagtatacatccttaattatcactgtcccctttaaaatgatattataccattttacttatcaaaaaagaactttccagcagagtacttccatttcctccctggctgaccttgttctattgttgtcatatattttacttatatatacattataagcctcataatactgtggtattacttttgctttaagaagttaattatcttctgaagagatttaaataataagaaaatcagtattttactcagatagttaccatttccagttttcattccttttgtgcagatccagagtttcatgtggtatcattttctttctttctgaagggtttcttgtaaaatttcatgtattagagaaatcttaatgacagattctttcagctttcatatgtctggaaaaacatttatttttgcctactgttttggaagatgttaacaatggtatataattctaggttgatagtttttttcccctttcaatacattaaagaagttgtgtcattgtcttctcacttgtattttttatgatgagaaatctgctgtaatccttttctccatttcactgtatgtaatttgcctttttactctgtctgctttcaaaattttttccttcttactggatttaagcaatttgattattgtgtgccttggttgttttcttatatttcttgtgcttggagttgagcttcttgaatctgtaaattttgagtttcatttgtaaaatttggaaaacttttagcttttatttcttcaaatattttttctgttcctcccccttcactttcttgaagactgcagttacgcatttattagaccacttgatgttgcccaacagcttgctgatgtctttgtttctgtatgtactttactttggataatttctgttgctgttgataagtttactaataccttcctccacaatgtctgatctcttattaatcatatccagtctattttttaaaatctcagacattgtgttttcttctcaggcagtctggtttgggctgtttttatattttctatgtctctaaatatattttctaactttttgaacatatgaaatacatattatattggttttaatgtctttgtctaataatttaataatctgtaaatttttcttctctttgcatgcctagtaatttttatattggattgcagacatatttttttgtattcctataaatatttttgagatttgttctgggaaacaaattacttggaaacagtgtgtttctttcagatcttgcttttaaactttattatgcgaaactagaaaagcacgtagtctaggactaatttttctcctatgctgaaacaaaatctttcttagtacttgatgcaccatgaattagaaggttttctgtatctgttgatatagagattatttctggccttgtatgaaccctagatactattctgtctaatccttctgatggttttctttccctctgtaacattggatgcatgatatctcacatgcatgtgttgattgatccccttcacatctctagacttctcattggagttctctcctctccaggacttttgcaaactctagctactttgacctctggatttcgctttccatctcctcaacttaaaaagagtctgctggattccactaaggttctgcttttctggggcaatcccagggctcacccttgtgtcctgtttcttagggatcactgctttttttttttttttttgcttgactccaatgtcttgaaggttgttgtttcatatatttaaagtgtctaggtttttttagttgttttaggcaagagggtcaatactccctgttactctatattggcacaagttttaaatttttttggaaaatttttcaaaatttctataagtgacaaagctattcttagcttacataccataaagacataagtgagaggctgagttttgcctgtaatctgtagtttgctgacttctctttagaccatttttctttaatatgattatcaatatggctaccaccttgccatttgttttctatttatcccatctggtttttgttcttttttcctttatatatatttttgttgttgttatactttaagttctagggtacatgtgcacaatgtgcaggttttttacatatgtatacgtgtgccatgttggtgtgctgcacccattaactcgtcatttacattaggtattgttttttgttctttttgagtattttttactattccattttatcttcactattgacttattagttgtacctctgttttatttgttatttgtttccctgtgatttataatatgcatttttttatgtcttctttaaaaaaaaaagcgggatacacgtgcagaacgtgcagttttgttacataggtatacatgtgccatggtggtttgctgcacctattgacccgtcctcttaagttccctccccttgcccccccaccccccaacaggccctggcatgtgttgttcccctctatgtgtccatgttttctcattgttcaactcccacttacgtgtgagagcattcggtgtttggttttctgttcctgtgttagtttgctggaggatgatggcttccagcttcatcccatgtcccagaaaaggacattatctcattccttattatgtctgcatagtattccatggtatatatgtaccacattttctttatccagtctatcattgatgggcatttaagttggttctatgtctttgctattgtaaatagtgctgcaataaacatgtgtgcatgtgtctttatagtagaatgatttatattcctttggatatatacccagtaatgggattgctgggttaaatggtatttctggttctagatccttgagaaattgccatactgtcttccacaacggttaaactcatttacattcccaccaacagcgtaaaagcattcctgtttctccacaccctcgccagcatctattgtttcttgactttttaataatcaccattctggctggtgtgttatggtatctcattgtagatttgatgtgcatttctctgatgatcagtgatgttaagtttttttccatatgtttgctggctggataaatgtcttcttttgagaagtgtctgttcatatcctatgcctactttttgatggggttgtatgttgttttcttgtaaatttgtttaagttccttataaattctgaatattagacctttgttagatggatagaacacaaaaattttctcccatctataggttgcctgttgactctgatgatcgtttcttttgctgtgcagaagctctttagtttaattagatcccatttgtcaattttggtttttgttgcaattgcttttggcgttttcatcatgaagtctttgcccatgcctatatcctgaatggtgttggttaggttttcttctaggggttttatggttctggtttttacatttaagtctttaatccatcttgagttaatttttgtataaggtgtaaggaaggggtccgatttcagttttctgcatatggctagccagttttcccagcaccatttattgaataggagatcctttccccattgcttgttttttttcaggtttgttgaagatcagatggttgtagatttatggtggtatttctgaggtctcttttctgttccattggtctgtatgtctgttttggtaccagtaccatgttgttttggttactgtagccgtgtagtgtagtttgaagtcaggtcgtgtgatgcctccagctttgttctttttgcttaagattgtcttggctatatgggctcttttttggttctatatgaaatttaaagtagttttttttctaattctgtgaaaaatgtcaatggtagtttgatgggaatagcattgaatctatgaattactttgagcagtatggccattttcacaatattgattcttcctatccgtgaggatggaatgtttttccatttgtttgtgtcctttcttatttccttgagcagttgtttgtagttctccttggagaggtccttacatcccttgttagctgtattcgtaggtattttattttctttgtagcagttgtgaatgggagttcattcatgatttggctctctgctagtctattgtaggtgtaaaggaatgcctgtgatttttgcacattgattttgtattgtgagactttgctgaagttccttatcagtttaaggagtttcggggctgagatgatggggttttctaaatataaaatcatgtcatctgcaaacagagacaatttgacttcctttcttcctatttgaataccctttatttctttcccttgcctggttgccctggccagaacttccaatactacattgaataggagtggtgagagaggatatccttgtcttgtgccagtcttcaaagggaatgcttccagcttttgcccattcagtatgacatcgactgtgggtttgtcataaatagctcttattattttgagatatgttccatcagtgcctagtttattgagagtttttaacatgaagggatgttgaattttatcaaagttcttttctgcatctattgagataatcctgtggtttttgtctttgtttctgtttatgtggtagattacatttattgatttgtatatgtggaaccagccttgtatccgagggatgaagctgacttgatcgtggtggataagttttttgatgtgctgctggattcagtttgccagtaattaattgagaattttcacatcaatgttcatcagagatattggcctgaaattttctttttatgtcatgtgtcttcccggctttggtatcaggatggtgctggctgtataaaataagttaggaaggagtccctccttttcaattgtttggaatagtttcagaaggaatggtgccaactcctttttgtacctctggtagaattcaactgtgaatccgtctggttctgggctttttttttgttggtaggctatgaattactgcctaaattttggagcttgttattggtctattcagggattggagttattcctggtttagtcttgggagggtgtatgtgtccaggaatttatccatttcttctagattttctagtttatttgcatagcggtgtttatagtattctctgatggtagtttgaatttctgtgaggtcagtggtgatatcccctttatcattttttattgtgtctatttgattcttctctcttttcttctttattagtctagctagaggcatatctattttgttaatttttttttttaaaccaggtcctggattcattgatttttttggaggggtttccatgtcttgatctccttaagttcttcaattcagttcttctctggtcttagttatttcttgtcttctgctagctttcagattagtttgctctttcctctctagctgttttaattatgatgttaggatactgatttgagatatttctagctttctgatatgggcatttagtgctataaatttccctctcaacattgctttagctgcgtcccagagattctagtacgttgtctctttgttctcattggtttcaaagaacttgattcctgccttcatttcactgtttactgaggagttattcaggagcaggttgttcagtttccatgtaattgtgtggttttgagggaatttcataatcctgaattctaatttgattgcactgtggcctgagagactgttatgatttccgttcttttgcatttgctgaggagtgtttcacttccaattatgtgattgatttcagagtaagtgccttgtgtcactgagaagaatgtatatcctgttgatttggggtggagagttctgtggatgtctattaggtccacttgatcctgagctgagttcaagtcctgaatatccctgttaattttctgtcttgttgatctgtctaaaattgacagtggggtgttaaagtctcccattattattgtgtgggagtctaagtctctttgtaggtctctaagaactcattttgtgaatctcagtgctcctgtttggatgcatatatgtttagaatagttagctcttcttgttgaattgttccctttgccattacgtaatgcccttccttgtctctttttggtctttgttgttttaaaacctgttttgtctgagactaggattgtaacccctgcttttttttttttcttgctttccatttgcttggtaaattttcctccatccctttatcttgagcctatgtgtgtctttgcatgtgagacgggtctcctgaatacagcacaccagtgggtcttgactctatccagtttgccggtctgtgtcttttaattggggcatttagcccatttacatttaaggttaatattgttatgtgtgaatttgatcctgtcataataatcctagctggttattttgcacattagttgatgcagtttcttcatagtgtcattggtctttatatgttggtgtgtttttgcagtggctggtaccagtttttcctttccatatttagtgcttccttcaagagctcttgtaaggcaggcctggtggtgacaaaatccctcagtatttgcttgtctgaaatggattttatttctccttcacttatgaagcttagtttggctggatatgaaattctgggttgaaaattcttttcttgaagaatgttgaatattggcccccactcttctggcttatagggtttctgcagagagattcgctgttggtttggtgggcttccctttgtaagtaacgtgacctttctctctggctgcccttaacatttttttctgcatttcaaccttggaggatgtgacaattatgtgtcttggggctgctcttctcaaggagtgtgttagtggtgttctctgtatttcctgaatttgaatattggcctttcttgctagattgggggagttctcctggataatatcctgaagtgtgttttccaacttggttccattctctctgtcactttcaggtacaccaatcaaacgtaggtttggtcttttctcatagtcccatatttcttggaggctttgttcattccttttcattcttttttctctactcttgtctttgtgacttatttcagtaagttgatcttcaatctctgatatcttttcttccacctgatccattcagctattgattgtatatgcttcacgaagttctcctgctgtgttattcagctccatcaggtcatttatgttcctgtctaaactggttattctagttagcagctcctctaaccttttatcatgtttcttaacttctttgcattgagttggaacatgctcttttagctcagcatagttttctgttacccatcttttgaaggctacttctgtcaattcatccatgtcatccttcatccagttctgcacccttgctggtgagatgttgcgataatttggagaagagtcactctggccttttagattttcagtgttttttcattgattctgtctcatcttcgtgagtttgtctacttttgatctttgaggctgctaacccttgaatggggtttttctgtggacttttttgttgttgttgttgatgctcctgttgttgcattgtttgtttgtttgtttcaatattcaggtccctcctctgtagggtttgctggggcttctgtaaggtttgctgggtttgctgggggttcacttcaggccctcttcatccggttcactcccatacctggagatgtcactcaacaaggctggagaacaggaaagatgggtccctgctccttctcagatctttgactttgaggggcgccaacctgatgcccgtaggattgttcctgtattgggtatctgccaacccctgttggagggactcacccagttgggtggcacagggatgtggacccatttaatgaagcactttgtcccttggtggtggggtgtgcttcactgggggaaacccgctcatctgggctgcctggattcctcagaactacgaggaggaaaggctaagtctgctggtccgcaaagactgtggccatccttcccgctaggggctcaggcccagggagatctaggttctgtccctgaccctctggctggagttacagagttcctgcaggggaaccccacccagtgaggaaggatgggtcagagtcaagcctgaaaaggcactctgaccacagtctgccacagccggtgtgttgggctgtgggagacatgtcttcgtaccaagccttccagcctccctggtcccaggaggggaaaagtgcagcctggagctatacagagggatgctgccttctcctgcccagggaacttagcgtgttaggcagttgtgagtcccagtgttgtttcatacgcctcccacaaggagctcaaatggcttagacagcaggcaaccgcagctatggtgctggttgcccctccccctgggagcttggtaggcttaagcagattccagctgagaggcggttgacaatctgtagggctctggggttgggatgctagccccagtggtgtggttttgtgagtgagatcatccaatccatgggttgcacagttctgtggaaaaagcacagtttcccttgctgggtagcatgctcattcactgcctcccttcactggtgggagggggctcccctgccccatgtggctcagatgggccactacaccacattgttcttccttcctctctggatcacactagtctcctagtcagttctgatgagagaacctggataccttggttgccagtgaaggattcacatgcctattatagttctttttaatgggaccctctgaacgccgctgttctgtttctagtcggccatcttggccctgcccccaatatgcatctttatctacttcctcaatggtattacagtacttcacttctaatgtaagacttttataacttttatatttctgtcctttgtactattgttcttatagattttacatctacatcaaacctgtcaaaacattattattttttaattgcctattaagaaattgaacagtgagaggaaaatttttgtcacatgtgtgctatttacacttcttttctttgtatagatctaaattttgatgtgatatcctttttattttctatttgaaaaactctttaacatatagtacagatttgatgaaaatggattctctcatctactttttttctaggtgaaaaatttattttctccttaattttgaaagacattttcactgggtataaaattccagtttggcattttgtttttctttcagctatttaaaagtgtattccactgtcatctggctttcatagtttctgacaagaagtctgtgacaattccagaactctaccctgaaagaacaagttaccttagactctgaactcttatctctgtcttctcaactcagtgaaatttctgtactttacttaggatcctgcctttttctctgtagtttggaatgctcaccttattttctgtctcatacattctagtccttcactggctgtttgctcttggatcaaaagtgttacttcatatatttaatccagttttttgttgttgcaaaaatcaagagagtaaatctggaccctgttactgtatcatagctagaataacatgttctttatttcagaaagttaaaaaataaatattcattgaatccactaggaacgacattccttctttagatgctagaattataaaaacattaactgtataggcttggtctctagtgtcatgaaatttgcattccattggaatcagaaacatttaataactgcaaatcaaaaaggtaatttaagataatagagaatctgtgaagacagtactgcagggtggtatgatagagtaatgggggaaagagtatactttaaataggaaaaacatgaaattgctgaggtggtaatatttgactttagccttgtaataaaaaacaggaattgacagactgtggtctgagggccagtgtctgttttgtaaataaggttttatgggaatacagccacagtcattcttttacatattgtctatagctgctttgtaacaataatgggaaagttgagtagttggaccataagcctaaaatatttactatctggtcttttcagaaaaaaattgccaatccttaacataaaagaagcacaccacttgctgattgagctgagatcaccactgactacattacttataaacctggtatatactttctatccttattcaacataatcaaccacttactccttctagaaatcgtttcttctttttcttagcttgtctgataccatgttcttttgttttattttctaatctctgtagcaacttcttcctcagcttctttagtctaataattttcctgaatctgatctttagtgttacagtatattagggctaggtttcatgtctgtcttctcccttttttttttcttaaatagcatcatgcactcctgtgtcttcaattactgtctatttcctcatgacttccaaatacatatctctagctaggcctgtcttctgaattttaaacctatgtctccaactatctacatgacattcatcaatctaaattcaataggttataaacagaattcatgatatcctctgaaaaagctgctttacctttatatttctctctttcagtaaatggcatctattgcttatgtcagtactctggaattcatcagtgtaaccaatcagtcattaagacctttcaaaattcccccttctatgtatttgattgtttatagttctttctgtgcttctatattcctagtccaagctgcctttccatgacctctgtggtaacttcctgtttgtctccacatatccattctcaaagtggttcattggacaccatagccagagttactgtaaatgaaaatcagtggcttcccagtgtttttaggataaagatcaaagtcttttccatggtttatagagtccactgaagaaactgtcctccctagctttatgctataccattttcctttttctaggtaatctggcattcttttacttcctcaattctccaaatgttttattagggtctttgcatgtattgtttctttcttgcatggaatggctgttttctttcttctttgcttacttaattcctgttttctctaggcagccttccctcaccctcactccctcctcttaggttctcatattattttgtccttagtccttttttttttctttttttcttttttttttgagacagaatatcactgttacccaggctggagtgcagtgatgtgatcgtagctcactgcagccctgaattcctgagtttaagcaattctctgtgccaaagcctcccaagtagctgggactacaggtacatgcccaagtaattgttgttgttgttgttttcagtacatttttttgtaaagacaagatcttgctatgttgtccagccatgtcttgaactcctagcctcaagtgatcctcctgcctcggtctcccaatgttctgggattgcagacatgagccactgtgcccagcctatccttagtcttaagtgcacttattacatctgtgattaatcacaactataattaatgtaattatttgtcttcctcacaaaactgtaaactccataacagaaggctttgtgtctgtgttgttcgccattgcatcgacagcaccaagcacattttctgatactaaatatttgtgaaatgaaataataaaggagtatattatgtcttttaattatcacaaaacccctgtaatttattatttctctttgggaggcttttaaattgcttgggagaaatttggtaaagaataattgtaatagctgccatttattgagaaactcccatgtgcttgctgttcactaggctacatacacaatcttattttaacccttacaacacccttacaatgtagttaattttattcccatttttatgtggggaaacaggctcagagaaggtatttcacttgctcagtgtacacagttagtgacagagccgtgattcaaacctaattgatctttctctatatgctcttatactctaccactgtatgttgcgccttctaaccagatagttactgcgaaaactcctgcaatttctaattttatcacaaggctcccactatattttcccccttttcattcctttaacagaagagtttaaagttagtatctagacataccagcttatatattcattaattaataatttatattcacacaatgattgtagaaatgtgagtgtttcttagattaccaaacatctgtgaaatcgtgaaggagtattgaaatttagtaatttggtttggatctttgaagatattctgtagaattgttttccaaaagttacaactggtttacaatttttttcttaattgccattaacaagttttgaccctgagatgagaaattattcacaaatttcaattaaatactggaatgcttcatattttctgtactttaggacagggatccccaacccccaggccacaggttggtactggtttgtgacctgttaggacctggactacatggcaggaggtgagcggtgcgtgagaaacattactgcctgagctccacctcctgtcagcgacagcattagattctcataggaggacggaccttattgggaacacacacaagagatctaggttgcggactcctcatgagactctaatgcctatgatctgaggtgggacagttttatcctgaagctcccccactatccgtccagggaaaaatttggtcccttgtgccaaaaacactggggacctctgctttagaacatgcagtaaaacttgaatggattgtttaacagattgtttctttaatgaatttatcacataaaatcaggcattgctttgaaaaagtgcagtttatttcactctgttattactgcgtggttccagattgttaaagattcagctactttaaagcagtgtcttaaagaattaatttttgtcctttcagcattggcagattcatttttgtcatggaacatcttatctccttatgatgcttttgaagtattaatataggtggaattacctatgatagtttggtggaactaaactctttgtcactttttctatttgtgagatttgcatatagtattgtagcttttttctgaaattttttgttttgcaacgtgccttcataagaaactcatcgatttgtatatttaaaaagaggctgtaaagcatttgaactagccccagtaggatcatattataattaataataataataatattaatgtcaccagggcttgcataacaattcataataattgtctttacacttaagtttaactactaaactttgtagcctaatatagtgatttttatcacaatgataaacttttttatttacctcttgaactgtatgtaagaacagagaccagtagacctagtttttcctggttattttgtagaacgggaattgggaactggaattgaggaagtgatttcaatttcatgtaaatttttctgctattaattagttggcctattaaatttttagagtagctattgaacttttgcaaccagttttattttgagtactttattaaagtatcatctgttagcttttcatatcatctcaccatattatcttactgaggtaaaatggaattttttgcttactgattttttacataagaattaagtgatacccatacataccaataacattgaaattccaggctttcccatgaaggaaaacagttaaattaatgctagatttataaggcactacaaaaaaaagcactaaataaatttttaatttaaaaataaaaaattaatagtgttgatggggggtggaatagacattgtagaatcctaatactatttaatgttgttcatatgtgtaagaaagacacattatattttaaaatatagattctaatattgaaagaaaaaaatcatcagttttggagatgaaacgcatttttaggaatcttatatggaaacttcaataaggacatttttataccagtggaaaacctgattggaacaccttagagacatattaggcactgttgtttggaatgccagataagttaacctctgtaagatatatattcttataaatcactgctagcatagctgtaatatgtgaagataatttattaatttggactgatgctgaatgtagacatcttccatatctaaccttaagcatttaaaaaaatattttaggactaattattttgtccaaaaaagcaatcttttgattattgatcttcacagaattgatttgtaagatgtcatgatcaattgtggttagcatctttattattatatccattccaagataattttaggcttttgataccttgatacctttgtctcttccaacttttgcagagactttccttgcttgcatacagagaagagctagtagctaatgaagaatgtgcaaacctgccttttttccctctcctaagaaaggagaattcatccactgccactgtaccttttttttcttttcttttttgtcttgcacagaagacagacatcttcctgtgaagggcttgtggcaaacctatccaactcgggtttcttcttccttgagaacgatctgattcatcatcatctgaaccagggatcacagtctaaggtccaggtgagggcaagtcagtctatatgttaagccagttcttttctggtcaggtaagtcatactcaggcatgaactcactcagcatcagtcagccttagttttttaaaagtttcctagtccccagagagataatacaatttatctattcatttattctaggatgcacctaaactattgatgattaatcaccttattaaatgattccattctgtgtataatgtgatcattttcaacacacttgttcatcttaaattccagaactcttaaaaggagtatatgtgtggggtgagagggagaaaaatactgaaacagataggtatttctagctgcaattttaatacttatccttatcttcatttttattttatgcgtaagagtttagaacaacttaaaatcagcctagaatatatgatcttataccttcgtaattttaataacgtttgattatgtttgtagatggcttggaaccagaagctgattgagaatattagagctaacatttgcactcatggtcatcacggaggtctttgttggcttgccatgaattctttcctttaatgtcaaaatgactaagacagagacaagaattttcctgttctgtatcccacttctatatgctagtaataagaaacttctgattgtgcctcaggcaagtggtcatagctaattgaaatccagttttgtaccttgatgctatcttacaacttgggaagtaaattaggtctgtggctatgaggctattttctggacaaaatagcctcttatttttcaaaaaaatttttttatttgaggaaaaaaatctacatgtattctgacatttataatccttcaaaatgcacttgggcattatgtgaaatttgttttataggtggacattttaagtaaattagtttaagtcttacaaaacattaatttgtttcatcatgataatgacattgtgtgcatttggttgtgaaaaaaacagaagtagtactttaatataccttgtctctgactttcacccacacatagcagatatgaataaattgggcatttatttctcctattggctaattttccaagtgactcttaagttatgaactgaagttaatatacttcagtgagtttgctacagtaatgactcctggtcactaggaagaagagagattgtcttcctctgaaatttttccaaccattaaggtaaatgggttgtaagaatactgttggcttcttgagatacattgttttgtgtttattattcaaaaacatctatactagttttgagcaagagaacatttctttggctggaaaggcaactttttaaagcattcattatttggaaccatgttactgttggaacctaaataaagtagttatttacttgagtctatattaggacaactaagttagtatggacttagaaattgttgggtacaaaccctgtgtttctatctcgttatgtttgtgtaatatgtgcagaagaatcaaaatatttattgggtgttttaaaatgtctccagtggtatctctcttgaacagaaaagccatttatttaattctgcttcagattctagtagaaaattatttcccactagatcataagtgttttaagatgattaggttcctgtatgtgcattgtatgagtatgtgaacatatcctaacccaattttataaatatataaagtaatttaaatatttagaaatctcaacattaaaccaagaatgtcatccacattaaagtgtgtattaaatatttgaatctgtattgtaatgaactcagtaggcatgtttcaaagacttaggaagtagcacagatttccattatgctcttgggctgggcaagtcaattacatcctcaaagggttgtaattttgtagaaattagcagactacaaaggatgcttgatggttgtatctgactggctttggaaatgcttacatttctaagactgtgaatttttaaataatctttcctactttttttcctacttttatccttcttgtatgtttttgtaaccagtagttttttaggtagacacatatgtgaactttaaacatttccatatttatagttagtgtaattattacaacatctgtttcaatatatgaatgaactaaaatttggaaacttaaaagatcagtttttagtctttaaaacattagagcaggatgagctcttaatcatctacacaaagatttacaggctttaaatatgtagatttagattatctgtgatagcattttcattctataccagttaatgcatttcagagacatgtggtgtgtgtattaagggacatgctagctgattgtaccttactgtaagcaaaacaaaattataaaagcagatttgttatgaaaaataagaaatcgatgatttccaaaatcaaaaatgtgactttcggactattctatgtgttgttggattgatctgccttttcttacacaagagcatactgctgaccccaccacaagctttacctgttaagtaaaatatgttgtgtttggaatatagcatagcctagagccaggcattatggagatgatatgctgaaattggggtttcttttcttcattctccctttccagttaggatttgattgcattactgtaataaacattaacattgaaatcatgttttaaatttcttcatgttcattttctggcctctgtaggacacacacagaaaagaccagtgaatgccatttcatctaagaagctctttaaatgcatccaagatgccagaaataaccctttcatacctcctgagtagtagcaacatgtaatggtataggaagaaatattccacctagcttttcttttggtggtgtcttgccattaactcataaaaacgtatatcctactattatctctaccataccttcatgtcattggttagattgcctgatggctactaatgtctcaagttaatagccacagaatatttcagaaaggtggcgtccactttataaaatgtgtctatgattgccaaagtcttatttggctagaaacaactaaatttagttgaccgagtaaaattgtatattcttagaatatgtcacttaaaacaaacaaatagtgatttactttcagttctgaaaatatttagaaggatttgttatctcttgcagaccttcctgcagactactaatgggatgaacacaatatatcacttttataatagtgagctattaaaggcaagcataaagcagtctgaagcccataagtgctgccaacagctcctgctttaatgaattcccttttagatgtccattaaatgctcatggcaaatgtactcataatggaaatggcaaatctaaatgggtagatatgaataatccatggagtttaaattctgtttatgatcatcttcacatttagttttcaagacaacgcagtttagttttcattacagtttggaataaagaggacagggagtaattgattgcttcaagcagattaaaatcaatggttttcttttcaaagaaccagttcaatgcagtaattccaactttaaacattgatttagaggactcaacacaaaatgttttgtgctgtgtgaacttttatataggaagactaatattaattttattcccctgtatatctgtatagtgaaatatagaggttgttagtaacatgtgcatgacttaatagtgatctatattaagtcattttgatattattgcagtcatataatgaatcagtgagattcccgtcatcactgtaatactgtttgtaacccattagcacagagaaattacagcccatcatacatcattactgtgattgaggctttattaccatattctcaaattgcttgcttgctataaaactaaatagacacaagacaactataggtagagtagagactgcgcattattgtgctacagtaatgagggattattgtaccataatgggttgaaacttatgaggaaaataaacttggcagtaatagaaaactggagactctttttacatttgtttttattactttaaaggtcaaatatatttgttatgctcaggttattgtttatgtattacatgaatcatagccttttaatattttctaaagatttttttcacccccacccccacccccaattgtatcctttcaaagtctgtggcctgatgcactttgaatgcttaggactggacttggaatctgtgtttttcctgttgtgagatgagacgttttactgctactaagcctaccatttctgagggtaggtagaaagctttaaactttaggctattttcagcatactatacattttgtttacagtgtggataggccagtggtcttcacgctcttcagttgaaataaatgtattaatgcagcaatattctaagcaatgaatacagatttaaaatatggaactgtctagggcctgattgtaaaagacttttgatgtttcaaagatgaaaatagaaaaaatatactgcgtccatattaaagaagaaaatcctacgacagtagaacttactgtagttataacctgggaccatgctgtcctctttggaagaatatgttgcctatgttgccttttctaactttagaggttattgttgctttggctaaaaatttatatgtaaagtgttttataatcatgaacatatgctaatttctgggttttgttttatattattatttttatttatttatttagtgttattttttagagacagatctcactgttgcccaggctggagggtagtggcactataattagaacttattaaattgtgcatatgttcattcactctctgttgagtcttgtttatgagttataacattgagagcataatatgaacagtgtaaagcccagggtactgactttggagataagattgcatggatttaaagttctcagtgcagagtggttttctgatctcaatctcattgtgatttgataccacgacaatttaaatatcaaacaatgacccatctgggcaacatagtgaggctctgtctctgctaaaaataaaaataaaataagagctgggcatggtggcgcattcctgtagtctcagcttctcaggagactgaaacaggaggatcatttgagcccaggagtttgaggctctagtgaaccctgatggggccactgcagcccagcctgggcaagagtgagacctgtctctaaaaaataataataaatgaatgaataaatatcaaataatataaaatgaaagccagaaattagcatatgttcatgattatgaaacactttatgtataaatactttgccaaagcaatagtaacctcttgttaacttagaaaaggcaacatattcttccaaagaggacagcttggtcccaggttgtaattacaagccacttacacattactcttagggttatcatatgtaattaccaccccctttgtaaagcatatattttatttataacacatactgtagttgtagtggtataaaacctgaatgcttgcttaccaaagaactgcaatgagacatgctgcataaaaggaaagcttagaattggctgaggggactatgcctaaatgatgccccagccaactctacctggtatattcttcaatgaagaaaactgtaaaacatcctaatcaaccaacttctttccatgcttgccagagtatatagccactttgaattacatgaatgtttttgtgactcggttcatttcatcacttcatgggagcaccttccatgttaaaaacagatgcagtgcaaaagcagaaagccagaaataatagtgagaggcaaagttagagaaatgtgcatattaaatctttaaaatactctatgactttttcctgcccagcatcttttgggggaaaaagagagaagatgaataaattaaaggtttttttctttctttgtttttttgagacaaggtctcactctgtttcccaggctggagtgcagtgttgccatcatggctcacggctcctggcagcttcaacctccaggctcaagtgaccctcctgcctcagcctcctgagaactgggaccataggcatgagccaccacaggtttggtttttttttcttaataggttggacatatggctataaataaaaaataagaaaattaaaaaagagtaagtgctaagaagaaaaataaaatgaaattataagtataagaaatgctagatggggttgttatatatatgattttttgtagaaggcctttctgataagatggcatttaaggaaaaatctaaataaagtgcaggacaagccaagatatttatctatggtaaaaaaatatcccaggaacagtgaatgtaagtgttctgagagagaagcatatttgatatgtatgcagaacagcaagactgctatggctcagcagataaagggggaaacataagaaattaaacatgataccttagtaattttttaaatgaatttaataacattaaagtctttctgtgtagttaggtttttgctattagagaggtggttctaagtcaaatgatgcttctaatatctttcttaatatattggatatgaccttgttttttaagtatttaaatatgcttgaacatgttaacccgatcatgtatcttttgtggaggtctagagtttttttttgttttgttttttagggtttttttttttaatgatacaggctttattatcttccccattttgcagatgagaacactgaggcatttacccagtggcttataagctgataggtgctaaagccaggaatcaaattcagaaagtgtagcccagattctgaacttttagccattgtttgcactgtttgtttctttttttgtttttttttttttttttttaagtaatttcaacttttattttagattcaggatatgtgtgcaggtttgttccatgggtatactgtataatgctgaggtttgggatacactacaacccgttaccaaggtagagagcatagtacccagtaggttttcttttctttctttctttctttgagacagagtcttgccctcttgccaaggctgaagtgcagtgttgtgatctcagcttactaaatctccacctcccagtcttaagcagttcttgtgcctcagcctcccaagtagctgggactgtaggtgtgttcttccatgcccagctaatttttgtatttttacaaaatacaacaaaatattcaagctattttattggccaagctggtgtcgaactcctggcctcaagtggtccagccaccttggcctcccaaagtgctaggattacaggtgtgagccacctctgtgcctctccccagtgtctcttgttgctgtctttatgtccatgagtactcaatttttagctcccacttataagtgataacatgcgatatttggttttcttttcctgtgttaattcacttaagataatggcctccatctgcatccatgttgctgcagaggtcacaatttccttcttttttatggttgcatagtagtctatggtgtatatatgctactttttccttttgttcttacaattttctatctttttctttataatttcagcatttatttttagatgtcaggggtacatatgcaggtttattacatgggtatattgcatgatgctgaggtttggagtatgactgaacccatcaccctggaagtgagcatactacccatagttagtttttcaaccctttctccctctagcagtccgctgtgtctcttgttgccatctgtatgtccgtgggtacccactatttagctaccacttgcaagtaataacatgtggtatttgtttttctgttcctgtgttgatttgtttaggataatggcctccagctgcatccatgttactgcagaggacatgatttcattcttttttatggctgtgtggtattccatggtgtatatgtactatattttctttacccagtccatcattgatgaacatctagattgattccacatcattgctattgtggatagtgctgcagtgaacatatgagtacatgtgtttttttgatagaacaattcattttcttttggatatatgcccagtaataggattgctgggccaaatggtagttctatttcaagttctttgagaaatcccaaggtactttccacagtagctgaattaatacatgttcccccccaacagtgtataagcgttcccttatctctgcagctttgccagcatctattgtttttttttcttttttgactttttaataatagccatcctgactggtatgcaatggtatcttactgtaattttgattttcatttctctgatggttagtgatgtggagtattgtttcatgtgtttgttggctgcttatatgtcttcttttgagaagtgttgattcatgtcctttgcccgcattttaatggagctgttttttgcttgctgaattgtttacatttgtcataaagtttggatattagacttctgttgtatgtataggtttttctctcattctgtagattgtctatttattctgttgatagtttcttttgctgtgcagaagctctatagtttcattaggttccatttgtcagttgttgtttctgttacaattgcttatgaggacataaacataaattctttcccatgactgatgtccagaatgatgtttcctaggttttcttctaggattcttatagtttgaggtcttatattaaaatctgttaatcggtcgagttaatttttgtatatggtatatacagctacatatagctagccaactatcccagaaccacttattcaataggaagtcctttcccgattgcttagttttgttgaccttgttgaagatcagatgtctgtaggtgtgtagctttacttctggctcctctattctgttccattggtctatgcatctgtttttgtaccattaacatgctgttttggttactgtagccttatagtgtagtttgaagttgggtaatgtgatgaatgcctccagatttgttctttttgttcaggattgctttggctattcaggctctttctgttctgtatgaattttagaatagtttttttttacttctgtgaaaaaatggcatggtagtttgataggaatagtgttgaatctatagattgctttggacagtgtggccattttaacaatattgattcctccaatccatgagcatgcaatgtttctccatttgtttgtgtcatctgatttctttcaacagtgttttggaattctccttgtagaaatctttacctttttgtttagatgtattcttaggtattgtgtgtgtgtgtgtgtgtgtgtgtgtgtgtgtgcacgtgcacagcaattataaatgtgattttattcttgatttgtctctcagcttcaatattattggtatatagaaatgctagtaactttttgtacattaatttttgtatcctgaaactttactgaagttgtttatcagttctaggagccttttgacagacttaagggtttttttcaggtatacaatcatattgttggccaagagagatagtttgacttcttttcctatttgcatgccttttatttcattctcttgcctgaatgctgtggcgagggcttccagtactatgttgaatagggtggtgaaagtgggcatccttgtcttgttccagttctcaaggggaatgcttccagcttttgcccattctgtatcatgtcgggtatgggtttgtcatagatggcttttattattttgaggtatgatcctttgatgcctagtttattgagggtttttatcataatggtaagttggattttattgaaagttttttccacatctattgagatggttttattgaaagttttttccacatctattgagatgatttgtttacatggtgaatcatatttattgatttgcatatgttgaaccaactttgcttcccaggaatgaagcttacttgttcctggtgaattaattgttgatgtgctgctggattcagtttgcttgtatattgtcgaggatttttgtgtctatgttcatcatgggtattgacttgtagttttcttttttcattgtgtctttgccaggatgtaccacattttctttatccattccaccatttatgggcacctagattaattctatgtctttgcttttgtgaatagtgctgtgatgaacatgcaagtgtatgtgtctttttagtaaaatgatttcttttcttttggttatatacccagtaatgggattgctaggtccaatggtagttctgatttaagttccttgagaaatctccagactgtggagacagtgcctgaactaatttatcttcctaccaacagtgtgtaagagttcctttttctctatagccttgctagcttctgttgttggttttttttttttttttttgctttttaataataactattctgactggtgtgacatggttttgatttgcttctctctgatgattagtgatgttgaacatttttttcatatccttgttgccacctgtatgtcttcttctgaaaagtgtctgttcatgtcttttgtctattttttttaatgagatgtatttgtttttgtttttttgcttattgaattaagttcctaatagattctggatattagacctttgttggatgcatagtttacaaatatttcctcccggtttatagattgtctgtttgttgatggttacttttgctgtgtagaaactctttaattagttcccatttgtcaatatttgttttgttgatttgatagactgctagctagactaagaaagaaaaaagagagaagatccaaataagtacaatcagaaatgacaaaggtgacattacatctgatcccggaaaaatacaaaggattctcagagactattatgaacacccctgttcacacaaacttagaaaatctagaggaaatggactaattcctggaaacaaaaccttccaagtttgaatcaggaagaaattgaagccccgaacagaccaatattgacatttgaaattgaatcagtaataaaaacctaccaaccaataaaagccgcagatcagatggattcacagccaaattctaccacatgtacatagaagagctggtacaaactctaccgaaactattccaaaaaatcgaggaggaagtgctcctccctaactcattccgtgaagccagcatcagcctggtaccaaaatctggcaaggacacgacaaaaaaaactacaggccagtatctctgatgaacgtggacaaaaaaaatccccccaaaaatactagcaatccacatctagcatcatatcaaaacgttagttcaccataatcaagtagacttcattcctgggatgcaaggttgtttcaacataatgcaaatcaataaatgtgattcaccacttaaacagaatgaaaaaccatataatcatttcaatagatggggaaaaagcttttgatttttgttcttgataagatatgacagaaagtctcagagtcagagccagggactttcttaaataattttagagcttttagttgcaaaatgtctttgtttttactgctggcataaataggttttccatttatttctagcactcagtaaaaacatattatttaatttactggctcttccaatgtagtatatgagtctgctaaagtttgtgaagtcttgttcgtttatttatttaggttgctgacaagtggaaataggtgagatatgaagttttggggattttaatcctgtagaaggggtccttgaattgaaaaaaagttttgagaaccagttgccttcttcccagggagaagatggagcagaggtcccaaacatggtaaaactgaggtagaaaagaagaccttaggagaagcttgaggttcaaagagagggaataagttaaaaatgtaaaaagttaacttttgaaacagagaagaggaaactagtgaagaaggaattcttcctcgctgcattctgcattagttatctattgccgcagaacaaattacccctaaacttagaagttttaggaaaaatcatattctatttcacagacttcctgaggcacaggaatttcggaatggcttagctgagtaattctcacttaaggtcttttatgaggtttcagtcgaaatgttgatccagggctgaaaattctgaaaacttgactggggttggaaggtcagcttgcagaatggcttgctcacgtaactgttaacagaaggcctcatcagttctagcctgttgttgacaggaggcctcacctccttgccacatgaagccctccatagggctgcttgattgtccccatgatatggcagctaatttccccaaagtgagtgatgcaagagagagggtgggaaagctactgtaaaaattgggggtcatgttattaattatttgttatttatttattattactattaagcagtaattgatagcactcattttcttcatttatattgtgattcctcattgtttttgatcatctcagggcacaaaataacaatctcccaaaacaaagaaaccaagctaccaccaccaacttgtgataaatacaaaatatacataatttatgtattttgaaggaagtcctgtaatatcctagttgaaattatttcttgaagtacagtcacacatcacttaacaacaagagtatgttctaagaaatgtccttttaggcaattttgttgttgtggaaacgtcaggaactgttcttacacaaacctggatggtatagcctactacacacctaggctgcgtggtatagcctattgctcctaggctacaaacctgtacagcatgttactatactgaatactgtaaacaattgtaacacaatggtaagtacttatgtatctaatcatagaaaaggcacagtaaaaaatacacttttttttaaatttaatattattttaagttctgggatacatgtgcaagatgtacaggtttgttacagaggtaaatgtgtgcgatggtggtttgctgcacctatcaacccatcacctaggtattaagtcccacatgcattagctatttatcctgatgctctccctcccactgcacccccgacaggccctggtatgcatcgttctcctccctgtgtccatgtgttctcattattctgctcccacttataagtgagaatatgtggtgtttagtcttctgtacctgtgttagtttgctgaggataatggcttccagctctatccatgtccctgcaaaggacatgatctcattctttttcatggctacatagtattctatgatatatatgtaccacattttctttatccagtctatcattgatgggcattagggttgattccatgtctttgctattgaaaaatacacttatatttttcatagatcctaggcctatacagggtcaggatcagcaagacacaactaactataaaaattcctatcatgtagttaggataggacctaactatatagttatatatagttaactatataggaactaacaatataattaggtcctatcctaaccatatgataggaatttttcaactccatgtaatcctaagggatcaccatcttagatgcagccaattgttgaccaacatgtcattatatagtgcatggcttttgtacgtcatggctacatttaaatatgcttgttttcagtgttagggaaatatatgtggtgaaagagatgattaattaatgctggtgtgttgtttgcatcaaagaggaaattttccttttacttatattttgaggatgattgggaacatcaagaatagatttatattacagtagcactcacatttgaatcatctttggattaaaaggttctaactagtgtcctttttgcattgcttttcttaattataactataaatcaaaaacatgtaaaactatagtgtgccaaatgttttctaagacccatttaatgattgtaataacccactctagggggggtcatcatctttttgtcaggacaatcaggtttacggataggctcctactcttaaatttgtgctttgtacagagggagtatatattacagacacttggataaatcatttcataaagtattttctgcagtatcttctaaaatataaagtaatttgattaaaaataaataagattgtacttagtgggcacaaaagtggatgaatatgggataacttcagaaaaaagagatatagctgatggtgtgtattgattgatgactactttcctgtacttaaacagtttatactgtgcaaatattgacctgtatcaagtgactgactacagtattttcatgcagatattccttgaattacttttgtaatcagtaattctttttgagacaaatatgtaaaatgaagtattcttctttaagaaaacctaggatctttttatttttatttaaaatattttattccgaagattccaggaacatacataggataaaatagtggtttcaaactggtttacaatcagtggaactgtttcttcaaatgaaattttacatagaagcaaatggctcagactgaaatgaggatgtggggttgcaagaagccagatgttccaatggttcagttcttactctctctgtggtgcccttggggtgtctctctggcatcctaagcctctaaggagtgcattttgagaactgtggacatatgtaggaatttgtaattcataggccatatgccattcatttgggtgttagatgacactgcctcagtgtcattgttagatcacataggctagccaacagtaaacaggaatatatttattgcatataaaagttattattagtgaacatgtttgtctaattgacactgataattagatgtgtgatgtggggtcagacacttccaattctcaatttctttatatgtatgtaactagagggagttggactagggtaagcagaagctcctggcacctgccattctatggttctgataatatttattgaccttcaatgaagagtctagaacttttctgctatgagataaagaaaaagtcttaagccatggtttggaactctaagagatttaaactcagattggtgagataaaactagccaacatgaaactattagagacaatctatcaaagtattaataaattgttttgcactataagatctaaacttatacagaggcaaatagaaaggatctattttaaaatccttacatttaaaataaaagtgcctgtttgacatttcatctaatttggtgaactggcaaattacacacacatgtatttcctactaagaactagaaatcaatcctgttgcactattatgatcttaaatatgatctcctaaacgtgtagaaaggtattagttgctttctttcccctggtgcctatgagtattaatatatattacattttaattttaatgcccccggtgaaatctgtattcttaaagaactagaaatctgaatttttcagctttaacagattgtattgtttatgagtacaaattaattttttttcacaaggcttttcttaaaatgaattttaatataacattaaagtcatatatatttcagcatattaaagaataaggaagaattttttatgttggaaacttattttaccttattagcaattttaattcattaagccttatttttgcttttgtaataataacattttttcaaaccatcttaaattttgtagagaattttaatttatttgatctttgactataatattcaaattggttttgctttgctcacaaaggtaaagagaattccaaatttactcataataaaaatattagagaaactgtcaataaatttactgttataattgaatcacatgatatctaaattgttgataatatgatctgctcgttaaacaatagtgtctggagaaaatgatggattaattgactgatggctaaagtttccctcaaatataatggtttacccagtttgatttgatttgtgtaaaataactttctctaataaacaatttgctcagaggcaatagaagaaatgaatggttatcaaaccaaacttaattagtctatcctagattgatattacttggggagtctttgttttaattgtggagtgctggatacaaagagtttggttcattattttttcctgtataaacactattgtgtaactacctatggaataataacatgtgaattcattttaataaatgcttgtaaagtgaattagctaattataccaggctaaaaatgattcctttaattattttggatatttaactggtacttcagttttattattgtttgtctgtaaatgtgatttgtattagctctgccaaactaattataatgtataacttaacaaacaatttgagcagttttgtaatgcttatattgttctcttctcttatgcaaaagaaaacattatttctagtttgcatgaaaataaaggtttgatacaaattcacatggaaatatatgtgtaaatagagaagaaaaacctctcaatatgcaaggtagtacttgatataactatatgaatgagaagaatgaacagatttccttcaggagaagataagccagtgactcattagtttaacttaaaatatgatatagcataagagatttgattgttattttaaagctggaaagatgagttttcttcatgccctatctagagagtgaaaaactcgatcctcattctcaaaaagaaagatttatagtaataatgtattgtggatgtcaaaaacaatatgcttcttaatcacttttacttaacagactaattgtctttaaatcagaaataaatgagaacaaaggctttagtaataaaaaatacagattccaagtttaggctttctaggggaaaagcaaaatagcctctaaaacagtatgcaatgtaaatcattcttcttttaaaaattaatatacagtaaaattcacatttccatcttttctggtgtacagttctgttttaacccaagtatatattcatgtaaccactatcacagtcaggatacagagtagttctgtcccctgagataaataaataaacaaacaaataaataaataaagcctccctcatggtgtcacatcttccctctgtccctaacacttgggatccactgatctgttcccattcactactgttttgccttattccagaatgttatgtaaatggaatcctataaaacttgaccttttaaaactggtttctttcactcagcacaattcctttgagaatcctccatgtttttacaatacagtttgttttctgtctccttcttcccaaattatagcaacactaatatcagtttttgaagtaaatataaattatctgccccatatggaaacttattttctccatcataggatccctaaaagaactggaacttgattttttaccctattcatgcctatagttctgccttttttttttttttttttgagctggagtctcactctgtcaccaggctggaatgagtgcagtggcatgatctcggctgactgcaacctctgcctcctgggttcaagcgattctcctgcctcagcctcccgagtagctgggactacaggcacgctccaccacgtccagctaattttttgtgtttttagtagagacacggtttcaccatgttgggcaggatggtcttgatgtcttgacctcgtgatctgcctgcctcagcctcccaaagtgctgggattacaggatgagccaccgtgcccggccagttctgcctttttaatggctgcattgtaattttatgaatgtaccatacttggtttaagctgtctccaacatagatacttagatatatttttttaaattatcttcagtgctacagtaaacatgcttatacagcatatgatatgtaagaatagctgccttcaatttctagaaaagcagttgctggatgaaaaaaaaatacacaaaattatatggttggatggattgcaatttgccttccaagaagattgaagcagtttgaacctcactccattatcttgccatcaatgtcatttgtaatctttgcaagtctagtagatagaaactgtcttactctaatttatatttcattaaatattaggacatttaaactcagtattctgaatatattatttctgtccaatttgagcagtttcagcacaatcttaatttttataaatctcaagtttgtcattttatttttgccattttaatgggattgtagggcatctcattgtagttttattttgcctttttttttttttttttttttgagatggagttttgctcttgttgcccaggctggagtgcaatggcacagtctcaactcactgcatcctctgcctccagggttcaggtgattctcctgcttcacttcccgagtagctggaattacaggtgcccaccaccacacccagctaattatttgtatttttagtaaagatggggtttcaccatgttggccagactggtcttgaactcctgacctcatgtgatccacccacctcggcaccccaaagtgttgggattacaggtgtgagccactgcacttggccttattttgcattttcttaatgggtaatgatgttgaacggtttttttttccacaaacttaattgcctccatatatcctctttggaaaagtatcttttcaagtcttaacccttttttttttgttttgtttttttttttttgagatggagtctcactctgtcgcccaggctggagtgcagtggtgcgatctcagctcactgcaacctccctccacctcccgggttcaagagattgttctgcctcagcctcctgagtagctgggattacaggcgcatgccaccacatcagctaatttttgtatttttagtagagacagggtttcaccatgttgggcaggctggtcttcaactcctgacctcatgatccgcctgcctcagcctcccaagtcttacccattttttaagttagctcatttgttttcttgctattgagttttgagaatactttatatatagattttgactacaagttctttgttggatatgtgatttgcacatttttttcctctaagtatgtagcttgtttttttcattctgaagtatccattaaatagcaaaagtttttattttggcagagtctaattattacatttttatggatcacgcttttgatatcatatctgagaaatctttgactaattctggttcacaaatattttctcctaaaagtgatagaattttatacaagtcttttgggctatcttttttccttttgctttaactgacttgcatctttacatttaatgtgagtttctgatagatttttttgttttttaattgagatagagtctcatcctggagtgcgatgacacaatcatggttcactgcagccttgatctcttgggttcaagtgatcttctcacctcagcttcccacgtagctgggaccacaggtgcactacacacccaactaacttttttattttttgtagagacatcttctttctctgttgccctggctggtctcaaactcctggactcaagtgatcctcctatctcagtctttcaaagtgctggaattataggtgtgacccaggatgcctagcccaaaagcatatctttaggtcttgtttttaatctgttcacacaatctgtctttcaactgctgtgtttatatcatttgcagttaattattactgatgcttggatgtagatctacccttttcttttttttttaacttttaggttcaggggtacatgtgcaggtttgttacataggtaaattgtgtgtcacatgggtttggtgtacagattattttgtcacccaggtaataaccatagtactcgataggtagtctttcagtcctctcctttctcccatcccctaccctccagtagactgtgctgtctgttgttctcttctctctgtccctgtgtactcaatgtttagcttccacttataagtgagaacatgtggcatttgattttctgttcctgtgttagtttgcttaggataatggcctcaagatccattcatgttgctgcagagggcataatctcatttttttaatggctgcatagtagtgcacagtgtgtatgtgccacatttttttatccagtctaccattggtgggcatttaggttgatatgcttgtctttgttactgtgaatattgctgcagtgaacatacttgtgcatgtgtctttatggtagaacactttatattcctttgggtgtgtatccaataatgggattgctgggtggaatggtaattctattttaagttcttcgagaaatcgccacactgctttccacaatggctgaactaatttacattcccaagagcagtttataagcattcccttttctctgcaacttcaccagcatgtattattttttgactttttaataatagttactctgactggtgtgaggaggtatcccattgtaattttgatttgcatttctctaatgattagtgatgctgaatattttttatatgcttgttggctgcatgtatgtcttcttttgaaaagtgtcagttcatgtcatttgcccacttttcagtgaggttcttgtaaatttgtttaagttccttatagatgctggatattagacctttgttggatgcatagtttgcatatgtgttctcccattctgtaggttgtctgtttactctgttgatggtttatttttgctgtgcagaagctctttagtttaattaggtctcatttgacaatttttgattttgttgcatttgcttttgatatctttgtcatgaaatctttgccaaggcctatgtacagaatggcattttctaggttagtttccagggtttttataattttaggttttacatttaagctttaatcaatcttgaattgatttttgtatatggtgaaggctaggggtccagtttcaatcctctgcatgtgactagctagtgatcccaacaccatttattgaatatgaagttttttcctcattgcttgtttttgttcactttgtcaaagagcacatggctgtaggcatgcagaattatttctgcacactcttttttgttccattggtgtatgtgtctgtttttgtaccagtaccatgctgtttcagttactgtagccttgtattatagtttgaagtctggtaatgtgatgcctccagctttgtttcttttgcttaggattgctttgggtatttgggctcatttttgttccatgtgagttttagaatagttttttctaattctgtgaagaatcacattggtagttgataggaatagcattgaatctgtaagttgctttgggcagtatggccattttaacaatattaattcttcctatccgtgaacatggaatgtttttcctttgtgtcactctgatttctctgagcagttccctctctgatttttccttcttgctacctttagattacttaacattttagttttccattttatctattgagtttattactataaactataaactactattagtatcttcaaatggatttttcatgattgttctagaaattatacatattcaacttttcacaatctacttagaattaatattttaccatttaaagtagaatgtaagtccccttattcttcactctttgtatataacatattacatacattgaaaacctaccagataatgttgtaacttttgcttttaactgtaatacatatgttatgtggctcacatctttaatcccagcactttggagaccagtgcgggcagatggcttgagctcaggagttcaagaccagcaaagccccgtctctacaaaaaattcaaaaattagctaggcattgtgacgtgtgcctgtggtcccagctcttcaggaggctgaggcagaaggatggcttgattgcaggagtgagatcgtgccactgcacttcagcctgagtgacagagtgagaccctatcttaaaaaaaaaatgtaagaagaaagtaatattgttacatttatttaaatatctaccctttctgttttctttcactccagatagtccaagttttcccctcacatactttcccttttgtctgaagaaattcccttacttcttatagagcagatccacagacaatgaattttcttagttttcttttatctgagaatgtcattatttcatctttattcatgaaggatgtattctctaatagaattagaattagagaatgtaattctgtaatagaattttgatttgatggttctttccctttcagcattttaaaaatgttctacttatatctgactgggtggtttctgataaaaattccatgttcatttggattgttattcccctctatgttatgtgctgtttttcttgggctgctttcaggatttcttttttcttggccttagttttcagcaatatgtcaaaattgtctgggtttggatttctttgtgtttatctttcatgagactgtaagtttatgtattttgctgaacttgagaatttattattccttttttctttatttattgttgtgaaattcacatgctatattgagtgtttttgaatatacacattcagtgacctttagtgcattcgccacctctctctagttttaaaacttttcaccactccagagaaatactttgtacctattaagtaatcactctctattctttatttcccctgccccttgaagataatactaatctactttctgtctgtatagatttgccaattctgtatattttatattaaataaatcatacaatatttgagcttttctgtcttgctgtttttacctagcattatgttttcaaggttcatccaaattgtaacattcacttaacttctttttatggctgaatactatttaatatttcactttatggctattacacattttgatcatcttttcatcagctggtttggatttgagatgatttcaccttttggctcttacaagtaatgttgctgtaaacatttttttacaagttaccatgtggacatatattttcatttctcttgggtatatacataaaagtagagttgctaaatcatatggtaattctttaactgaattgctgtcaaactattttccatgatggccacaccattttacattcccaccagcaatgtaaaagagtttatctttctccacatccttgttaacatttgttatttttagggtcgctttcttgttgttgttttatgttattgtagccatcttggtaggtgtgagattatagcttattgtggttttgatttgcattttcctaacgtcagctgaggtttagcatcatttgtttgttggctatttgtatatattctttgaaggaggatctggatttttaaatcctttgcttatttttaaattgggtcgtttgactttttcttgttgaattgttagtgttgtttatacattctggatatgaaatcccttatcaaatacatgatttgcaaatatgttctccctttttgtaggttatcttttcacttttttgacgatattctttgaagctcaagattctttaattttgaggatgtctaatttatctattctttggttgcttgtggtttttgagtcaaatctaagaatttaataacagttacaaggtcatgaagattcatccctatgtttttttctaatattttatacttttagctcttgtattttgtatagggtgtgagattataggatccaacttcattcctttgcatgtggtcatccagttgtcccagcaccatttgttgaagatactattctttccccataaaagtatcttagcaccatagtcaaaaaatcatttatccatagattatagggtttacttctggattctcaattttgttcctttgttctgtatgtctgttcttacgctattatcacacggttttggttactgtagctttgcagtaagttgtaaaatcaggaagtatgagatctccaactttgtttttcagtattgttttggctattcaggactctttccaattgcaaatgaatttgaacatcagattttctgtttctacaaaaatgccattgaattttgataggtattgtgtttaatctgtagattattttcataagtattgccatcttaataatattaagtcttctaacccatgaacatgaaatgtctttctttttttgagatggagtttcactgttgttgcccaggctggggtacaatggcacgatctcagctcacagcaacctctgcctcctgggttcaagcgattatcctgcctcagcctcccaagtagctgggattacaggcatgtgccaccacacctggctactttcatatttttattagagatggggtttcatcctgttggccaggctggtctcaaaatcttaacctcaggtgatccacctgcctcagcatcccaaagtcctgggattacaggcgtgagccaccgtgcccggccatgtctttctatttagttaagccttctttaatttctttcaacaatgccttagaattttttttttttaattaggcaagttctcttttttctcaacttttattttaggttcaggtagtacatgtgcagattcgttacatgggtaaattgtgtgttgctgaggttcagtgtacgaatgatcccatcactcaggtactgaacataaaatctaagagatagcttttcaactcttgctcccttacttcccttctaatagtccccagtgtgtcttgttttcatttttctgcccatgtagaattttcattgtacaaatctttcacctcccttgttaaattcattcctagatattgtatccttttgaatgctattataaatggaatttttaaaattttccttttggattgttgattgctagtatataggaacttaacagaatttttgtttgttgatcatgttccctgcaactttgctgaattcatttattagctgtagtagattttttgtagacttttgtagattttctatatatagaattatgtcatctgtaaagaggtagttttgttttttttccccactctgcaatttgtaagccatttatttatttggcctaattgctctagccaggacttccagtacaatgttgaatagcagtggtgaaagtggtcatcctcttgttactcatcttgggggaaagctttcagtctttcaccattgaatgtgatgttagctttttttccttcaaatcctgtcagtgtttagttcatatatatatatatatatatatatatatatatatatatatatatatattgctgtatttgatgcatatatgcttatcattgttatatattcttactgaaatgactattttatcaatatgtctttctttgtctcatgataattctctacttaaaatctatgtattctgatatttgaatagccattctagctatcttttagttactgtttgcatagaatatccttttttatcctttcactttcaatttgtttgtgtctttggatctaaagtgagtctcctgtaagcagcatatagttgactggtgtggtttggttttgttttcgggggttttttgttcacttgttcatttttaaagtgaaagcaagtttattaagaaagtaaaggaataaagaatgactactccattggcagagccagtgtcttgggctgctcactgcgattacacttatagttatttctttattatatgctaaacaagggattgattattcattagttttctggaaaaggggtgggcagttcttggaactgagggttcctcccccattttagaccatatagggtatcttgctaacattgccatggcatttgtaaattgtcatggcactagtgggagtgttttttagcatgctagtgcattataattagcatataaagagcagtgaggataagcaggggtcacttttatcaccatcttggttttggtgcattttggccagcttctttaccacatccttttgtcagcaaggactttgtgacctgtaccttttgccgaccttctgtctcatcctgtgacttagaatgcctagcctcctgggaatgcagcccagtaggcctcaaccttattttacccagcccctattcaagatggaattgctctggttcagacacctgtgacgtgtttcccccctcccttttacaagggaatccttaatcttaagggttgtagagggacaatgatgcatcttctataacttcttcaggctgaaaacaggtgatgatatacatgtctaactattagggtctcttgtattcagggtggagaggcgcacatttagaaagcatccatatgctgagggccattcataactcttgagatccgacagaaggtggtatctggaagactaataagtgttcaacttaagaaaacattgagtgagtttatcctgcatatctacacaaagagtacaatatcagtgtattccacaacagtaaagaaaaataagcaaaattatcccaagtaaagagagctttccatgaactgggccactgtcggaaccaaactgatatggggttgctagctgattcctgtttgtccagaattagaatactgatccagatttttacattactcatccctcttgtttcttgtgagcagcagctagaaatcactggttggtttacaggaatagacagggttagtctgaattgcaggaaaaaaacatcagaaacaactgatgaaactagcatgtactaacaggtgtaccatatttcttgaaacataatttttctctctccagtctcccatttttattaaagacaaatcatggtacgaatgatttgttctcaaaataagatgtattcttatacttggcctgattatttgtataaagttcagcaagaataattaattttcacatatgctttttaaattggctttgatggaactttgttccaaaaaggaatctcaaacaagactttttttcataaagctgagcctaaccatgggtttgtaccatcaaatacctatgagttgagcaaattcctcttatcttgaggttccaagataacttggggcttctggacctgttagaaagtgacattctgtacttagcacagatcaggaaccctctatagggacagtatagacaaggtatgaggccagttttcccaaggggcttttattggctctgtaagtcaagtttgatacctttaagaaaagcatgctattcgagtcaaagccttggcaaaacaaccagtttctccagttgtgtcctgttgccaaaaaaaaaaaaaaaacaaaaaaaaaaacattcttattacacttgtgcaagtaaaactatgttgccgtaaattaagattactcacaaatagtttcgaaattctggagaaatcagctagagagaaacaaatatgttccaaattttgtttacaggaaaatactttattcaattgtttaaagttgtaaatagctcaaaagaaaatcttcttaactctgaaaaccaaaacaaagaattggtaacattttaagcaaaaagccaaaaaagattacttcagttttctattagttcagtccatgcagttaactcctgtcctgacttatcatcaccaacatttcagctctccatgagtcctgaaagttttttcctgtattctaatgccacagtctccaaagttaccagaaacctgcattcaggagcacctgtcaaagttctatagctgacttataaaccaccttttaaagaggatcaaaacaagataacaatcgtttgtgaatgacaacatgtcttagggcagccacagtcaaaaacatgattgacaaagaaattttgttatcttggtggcatataatgattttatgtaacaattataattattactgataacatgcactaaatcatatcagaattacaggagtttcccgtaattttggaacagataccaataacaccaataacatattcaaacaaatacatccccaggaaagccaaacaccattttatatttgacagtgtttcttgtgatttttataccagataagccctatatgtcacttttggactttaggggacctaatatctaaaagatgaattaggttagaaaagacatcatttataattttactttggaaagtttgtcatatattaaaggtttaaaacacttgatattgtaaaatcaaatcccaggtcaccagaagtcattgatttagccaaattatacctcaaaaattttttaaagccaaaaacctttactcattaaggggaagacagctttccaaccaatcggtctcttttcttttcctcctttttcctacagtttattcagaaggcaaacaaaaatatttcattttttaatataacatgaaaatcttgttcaagaaaggaagctaactttcacctttgcgttagtgcactattgatgtcaaaccttaacaaaaccctatagacaaatccatctagtctcaatcagtatgaccttaaggtaagattcatataaaccttttatagccttttacagcttttgtgaaagagcagatccatgctctaagaaaattctggtgtgcttttattctaatgttcaatttatggaaaaactgagtaccactttaactttagccaatatgttcacacacagaatttcttttacaagattattttttcacaaatcctccacaacttgattgttttctggtttgtggttcctgtgttcctttttatagtgacaaaccattttatatattttaaatgttttcattttgtacaataaagttagcatattttatacatatttatataattatgtttatatatgtgtttattgcattttgcttttttcacttaattatatctcctggaaatcattccatttcaatacatagagttcctcttcattctgtcttatagcttcatagtactccattttgtgtggatatcatagggtattttaccccccagtctccattgctttacaatcacaaatgatactgtacgaataactttgtgattatgtatttattagtctgttctcaactgtgaagaaatacccaagacttgataatttataaagcttcattgatttacagttttctgttgctggggaggcctcaggaaacttacagtcatagcagaaaggaaaagagaaggcaccttcttcatagggtagcatgatggagggagtgcaagcaggggtaatgccagatgcttacaaaaccatcagatcttctgagaactcactatcacaagaacagcatgggggaaactgcccccatgatccaattacctacacctggtctcggccttgacacatggagattatggggattacaattggaggtgagatttgggtggggacacagagccaaaccatatcatatattttcatattgttggagatacatattttagataaattcatacagggatttctagcttgagatttggttatatgtagctggttagatattgacaaattctccttcatagggattatgacattttctgtatccatcaaaaatatatggcattacctatttctctcttacctcactaataaaatgtatttttttattttattattattatactttaagttttagggtacatgtgcacaatttgcaggttagttacatatgtatacatatgccatgctggtgtgctgcacccattaactcatcatttagcattaggtatatctcctaatgctatccctcccccctccccccaccccacaacagtccccagagtgtgatgttcctcttcctgtgtccatgtgttctcattgttcaattcccgcccatgagtgagaacatgcggtgtttggttttttgtccttgtgatagtttgctgagaatgatgatttccaatttcatccatgtccctacaaaggacatgaactcatcattttttatggctgcatagtattccacagtgtatatgtgccacattttcttaatccagtctatcattgttggacatttgggttggttccaagtctttgctattttgaatagtgccacaataaacatatgtgtgcatgtgtctttatagcagcatgatttatagtcctttgggtatatacccagtaatgggatggctgggtcaaatgatatttctagttctagatccctgaggaatcgccacactgacttgcacaatggttgaactagttcacagtcccaccaacagtgtaaaagtgttcctatttctccacatcctctccagcacctgttgtttcctgactttttaatgattgccattctaactggtgtgagatggtatctcattgtggttttgatttgcatttctctgatggccagtgatgatgagcattttttcatgtgtcttttggctgcataaatgtcttcttttgagaagtgtctgttcatgtccttcacccactttttgatggagttgttttttttttttcttgtaaatttgtttgagttcattgtagattctggatattagccctttgtcagatgagtaggttgcgaaaattttctcccattttgtaggttgcctgttcactctgatggtagtttctttcactgtgcagaagctctttagtttaattagatcccatttgtcaatttttgcttttgttgccattgcttttggtgttttagacatgaagtccttgcccatgcctatgtcctgaatggtaatgcctaggttttcttctagggtttttatggttttaggtctaacatttaagtcttgaatccatcttgaattaatttttgtttaaggtataaggaagggatccagtttcagctttctacatatggctagccagttttcccagcaccatttattaaacaggaaatcctttccccattgcttgtttttctcaggtttgtcaaagatcagatagttgtagatatgcagcgttatttctgagggctctgttctgttccattgatctatatctctgttttggtaccagtaccatgctgttttggttactgtagccttgtagtgtagtttgaagtcaggtagcgtgatgcctccagctttgttcttttggcttaggattgacttggcaatgcgggctcttttttggttccatatgaactttaaagtagttttttccaattctgtgaagaaagtcattggtagcttgatggggatggcattgaatctgtaaattaccttgggcagtatggccattttcacgatattgattcttcctacccatgagcatggaatgttcttccatttgtttgtatcctcttttatttcattgagcagtggtttgtagttctccttgaagaggtccttcacgtcccttgtaagttggattcctaggtattttattctctttgaagcaattgtgaatgggagttcactcatgatttggctctctgtttgtctgttattggtgtataagaatgcttgtgatttttgtacattgattttgtatcctgagactttgctgaagttgcttatcagcttaaggagattttgggctgagacaatggggttttctagatatacaatcatgtcatctgcaaacagggacaatttgacttcctcttttcctaattgaataccctttatttccttctcctgcctaattgccctggccagaacttccaacactatgttgaataggagtggtgagagagggcatccctgtcttgtgccagttttcaaagggaatgctcccagtttttgcccattcagtatgatattggctgtgggtttgtcatagatagctcttattattttgagatacgtcccatcaatacctaatttattgagagtttttagcatgaaggtgttgaattttgtcaaaggccttttttgcatctattgagataatcatgtggtttttgtctttggttctgtttatatgctggattacatttattgatttgcatatattgaaccagccttgcatcccagggatgaagcccacttgatcatggtggataagctttttgatgtggtgctggattcggtttgtcagtattttattgaggatttttgtatcaatgttcatcaaggatattggtctaaaattctcttttttggttgtgtctctgccaggctttggtatcaggatgatgctggcctcataaaatgagttagggaggattccctctttttctattgattggaatagtttcaggaggaatggtaccagttcctccttgtacctctggtagaattcggctgtgaatccatctggtcctggactctttttggttggtaagctattgattattgccacaatttcagagcctgttattagtctattcagagattcagcttcttcctggtttagtcttgggagggtgtatgtgtcgaggaatttatccatttcttctagattttctagtttatttgcgtagaggtgtttagtattctctgatggtagtttgtatttctgtgggatcggtggtgatatcccctttatcattttttattgtgtctatttgattcttctctctttttttcttcattagtcttgctagcggtctatcaattttgttgatcctttcaaaaaaccagctcctggattcattgatttttggaagggttttttgtgtctctgtttccttcagttctgctctgattttagttatttcttgccttctgctagcttttgaatgtgtttgctcttgcttttctagttcttttaattgtgatgttagggtgtcaattttggatctttcctgctttctcttgtgggcatttagtactataaatttccctctacacactgctttgaatgtgtcccagagattctggtatgttgtgtctttgttctcattggtttcaaagaacatctttatttctgccttcatttcgttatgtacccagtagtcattcaggagcaggttgttcagtttccatgtagttgagcggttttgagtgagtttcttaatcctgagttctagtttgattgcactgtggtctgagagacagtttgttataatttctgatcttttacatttgctgaggagagctttacttccaactatgtggtgaattttggaataggtgtggtgtggtgctgaaaaaaaatgtatattctgttgatttggggtggagagttctgtaggtgtctattaggtccgcttggtgcagagctcagttcaaatcctgggtttccttgttaactttctctctcattgatctgtctaatgttgacagtggggtgttaaaatctcccattattaatgtgtgggagtctaagtctctttgtaggtcactcaggacttgctttatgaatctgggtgctcctgtattgggtgcatatatatttaggatagctcttctttttgaattgatccctttaccattatgtaatggccttctttgtctcttttgatctttgttggtttaacgtctgttttatcagagactaggattgcaacccctgcctttttttgttttccatttgcttggtagatcttcctccatccttttattttgagcctatgtgtgtctctgcatgtgagatgggtttcctgaatacagcacactgatgggtcttgactctttatccaatttgccagtctgtgtcttttaattggagcatttagtccatttacatttaaagttaatattgttatgtgtgaatttgatcctgtcattatgatgttagctggtgattttgctcgttagttgatggagtttcttcctagccttgatggtctttacaatttggcataattttgcggcggctggtaccggttgttcctttccatgtttagtgcttccttcaggagctcttgtagggcaggcctagtggtgacaaaatctctcagcatttgcttgtctgtaaagtattttatttctccttcacttatgaagcttagtttggctggatatgaaattctgggttgaaaatttgtttctttaatatggttgaatattggcccccactctcttctggcttgtagagtttctgccgagagatccgctgttagtctgatgggcttccctttgagggtaacccaacctttctctctggctgcccttaaaattttttccttcatttcaactttggtgaatctgacaattatgtgtcttggagttgctcttctcgaggggtatctttgtagcgttctctgtatttcctgaatctgaatgttggcctgcctttctagattggggaagttctcctggataatatcctgcagagtgttttccaacttgtttccattctccccgtcactttcaggtacaccaatcagacgtagatttggtcttttcacatagtcccatatttcttggaggctttgttcgtttctttttattcttttttctctaaacttcccttctcacttcatttcattcatttcatcttccatcactgataccctttcttccagttgatcgcatcggctcctgaggcttctgcattcttcacgtagttctcgagccttggctttcagctccatcagctcctttaagcacttctctgtattggttattctagttatacattcatctaaatttttttcaaagtttttaacttctttgcctttggtttgaatttcctcttatagctcggagtagtttgatcgtctgaagccttcttctctcaactcgtcaaactcattctctgtccagctttgttctgttgctggtgaggaactgctttcctttggaggaggagaggcgctctgctttttagagtttccagtttttctgctctgttttttccccatctttgtggttttatctacttttggtctttgatgatggtaatgtacagatgggtttttggtgtggatgtcctttctgtttgttagctttccttctaacagacaggaccctcagctgcaggtctgttggagtttgcaagaggtccactctggaccctgcttgcctgggtatcagcagcagtggctgcagaacagcagattttcgtgaaccgcgaatgctgctgtctgatcgttcctctggaatttttgtctcagaggagtacccagccgtgtgaggtgtcagtctgcccctactagggggtgcctcccagttaggctgctcgggggtcaggggtcagggaccgacttgaggaggcagtctgcccgttctcagatctcaaactgcatgctgggagaaccactgctctcttcaaagctctcagacagggacatttaagtctgcagaggttactgctgtctttttgtttgtctgtgccctgcccccagaggtggagcctacagaggcaggcaggcttccttgagctgtggtgggctccacccagttcgagcttcccggctgctttgtttacctagcgagcctgggcaatggcgggcgcccctcccccagcctcgctgctgccttgcagtttgatctcagactgctgtgctagcagtcagcgagactccgtgggcgtaggaccctccaagccaggtgcgggatataatctcctggtgcactgtttgttaagcccatcggaaaagcgcagtattagtgtgggagtgacccgattttccaggtgctgtttgtcacccctttctttgactaggaaagggaactccctgaccccttgcacttctggagtgaggcaatgcctcgccctgcttcggctcacacacggtgcgctgcacccactgtcctgcgcccactgtctggcactccttagtgagatgaacccagtacctcagatggaaatgcagaaatcacccgtcttctgcgtcactcacgctgggagctgtagatgggagctgttcctattcggccatcttggctgccagtcctagaatgtatttttaagcttttgaatttgttgctaatttgatgggtgaaaaaattgacttttattgtaattttaatttgcatttctcttttatatgaatgaaattacatatgtttttacataattaacaagcatttttatatctcctttgagttgtttattcaaatctttgcccatttgtttgtttttttgtttgttttcagacagggtttcactctgttgcccaggctgtagtacagtggcatgatcttggctcactgcaaccttctccttccaggctcaagtgatcctcccactttagccttccaaggagctgggactacagacacatgccactgtgcccaggcacatgccaccatgcccagctaatttttgtatttttttttcatagacatggggtttctccatgttgcgtaggctggtgtcgaactcttgagctcacatgatctgcctgcttctgcctcccaaagtactgggattacagacatgagtgaccatgcccagcctccctgcccatttttctataggatttctataggttgattttcctcaatttaaaaaaaaaaaatccttgatttattaagaatgtaactatttatctgcgatatatgctgtgaatgtttttcccaattttgtcagttacctttgattttgttaatgagttttctttggctatgcacattttccaacgtatcatcttattttgtttttaattgcatctaggattttagtcatagttaggaaccctttccttacagatgggttttagaggaattcactgattatttcttttggtgcatatatagatttactttttatatttatatctctgatccatttggagtttattcttgggtgtagtggaaggaatgaatctacttttaccttttttcaaatggctatccggtattccctacaccaaccatcctcaacctttttggcactagggaccaggttcatggaagacagattttccacagaatgggggggtggggtgaaggggacggttttggcatgaaactgttccacctcagaccatcaggcatcacttagattctcataaggagcacacaacctagatccctcccatgcacagtttacagtaggtttcctgctcctgtgataatctaatgctgctgctgacctgagaggagacggagctgtcaggtgataatgctggcttgccctccgctcatctcctgctttgtgactcccagttcctaacaggctatggactggtaccagtccatggcccagggctttgggatccctccccgccctacactgtgtattaaccagagcatctttgacccaatgatttgagataccagttttatcatatactagatgtttatatgtaattggatctaattctagaaattatattttattccattgatttgatagcttattcttgtgccagtaccatactgtttaatgaaagaggtttgtagcatgtttttataccttggagtagttctaccctgcctcctttcccacctttcacagatctttatattcattaatttcctagctattcttgtgtttatttttattattttttgagacggagtctcactctgtcgcccagattgaagtgcagtggtatggtctcggtgcactgcagcctctgcctcccgggttcaagtgattttcctgccccagcctcctaagtagctgagattacagacgcccaccaccatgcccagctaattttttgtatttttagtagagacaggatttcaccatgttgatcagtctggtctcagactcctgacctcaagtgatctgcccacctcggcctcccaaggtgctgggattacagtcatgagcaactgcacccggctgtgtttattttttattttcagtttgaaataaaactaaatttgttccaagcatgcaatacatggttattaatcatagttaccatattgtacaatagtcttcttgaacttatttctcctatcccactggaattttgtatcctttgaccaatctgtccccaacttcaccttcctccagtccctggtaaccactattctgctctctacttttatgaggagttcaggtttttttgattccacatataagttagattatgcaatatttacctttctgtggatagcttatttcacttaacataatgtcttccaagttcactcatgttgttgcaaatgacgggatatccttcttttttaaggctgaatagcattccactgtatgtatataccacattttctttatccattcatctgttgttggacacttaggttgattccatatcttgtctgttccaaataatgctgcagtgaacgtgggagtggagatatttcttcaacatacctatttcatttcctttggatttatacccagtagtgaaattgcttgatcatatggtaattctgtttttaactttttgaggagcctccatattgttttccataatggctgtactaagttacattcccaccaacagtgtgcaaacgttcccagatcttttttaaaaaaagttcaaaagagagaagttaagggtgtccatcactagtagacctgtctgacaacaaatgctaatggaagtccttcagactgaaatgaaagaaccctacactgtaattcaaagccatatgaagaaagttttttgttttccccattgccttttaattggtgagtttaatctatttacattaaaaatataggttattttaagttattatcaataatgaaccacttagttgtgctattttgctgtttttctatatgcttttgttcctcagttcctcctatactgccttcttctttgattgatattttttctagtgccagttttaattccttctccaattcattttgtataattttaaaattattttcttagtggtgtccatggggtttacactaaacatcctgaatttactttgacttgatattaagattacttgaatagcatacattaactctcctcatatctagctctgtcccctcccctttgcattattattattgccacaaattacatctgtatacattgtgttcttgttaacatatatttacagttaatgccttttaaatcatattggaagcagaaagaagggttacaaaccaaaaatacaataatattggcatttatttatctgtgtacttacttttatcagagatctctatttctctgtacgccttcgagttacagtataatgttttctttcatttcaacctgaagatcttccttcagcatttcttaatggggctagtctgttagtaatgggcttctttagcttcttaaaaatttttttaaatctaggaacgtcttaatttttcctttatttttgaaggagagtgttactagatatcaaatgcttagtcaacagtttttttcttctttcagcagttagatgatcccactgccttctgacctccatgttttctgatgagaaacctgctgttagtcttattgagaatctttgtatgtgataactcaattcttactcactactttgaagattttctttttatttcagcagtttctttataatgtgtctttgtgtggatctcttttaatttattctgcttcaattcactgagcttctgggatttatagagtcatatctttcagcaaatttggtgtgtttttcatttcgttatttcttctcttccttactgctcctttctccctctcttttccttctttaattctcataatgtgtaagttggtatgcttgatcatttctcccaagttccttctggactgtttatttttcttcatcctttttctttctgatactcagactgagtaaatttccctgtttccaagttcactgattctttcttctggatgctgagatgtgctcttgaactcctatattgatttttttaatttcagctcttataattttattttctttcagctattgtgcttttcaactccagaattcctgcttggttaattttataacttctattttttgttaatattacctacttgttcacacattgttctcctggtttcctttcattcctgttccatgcttttctttagctctttgaacatatttaaagtctttgtctagtaaatccaatgtatgggcttccctcagaaattgtttttgtcaattttcttcctgtgcatagcttatactttcctggtttctctgtatgctttgtcatttctagttgagaagtagacattttgagtattgtaatgtggtaactctgaaaattatatttttcctccccagggaacactgctgttactttccttttgttgttgttgttgttgttgttgttgttgttgttgttgagacagagtctcactctgttgcccaggttggagtgcagggatgtgatctcagctcattgcaacttctgcctcccatattcaagtgattgtcctgcctcagccacccaagtagctgggattacaggcatacaccaccacgcccggctaatttttgtttgtatttttagtagagacaggatttcaccatgtcggccaaggtcaaactcttgacctcaagtgatctactcgcctcggcctcccaaactcctgggattataggcagtgagccaccacacccagctggtgctgatacttctcaaaggctgcagttactcgtttatttagtaactttccaaactatttttgcgaaaactatccttgtcatgtttttgcgatattttgcgaaaactatccttgtcatgtgtggtcactgaggtctctatttcatattctctacagccagctggtgacctgacagcagtttacctgaatgcctggaaccaataagtaaaggagaaaaaaaataggtgttctgtttctttaaattatttcaacagaggcctccaggaaatctacttctacttgaggggattgaaacattgctggccagtcattgaaccactaggcagattcaaatatacaactctgatttttgttagacagggtccttattttctgccctagcagcaggaagctgcaccaggaacttgggcctttctcccctcactgccttctgcaggtctggaagtgatagttgctgtgcaaaatgctgaaatttaccagcttctttattcatcaagcagtcacctggatgccacaagtcttcagctagagtctagagttctgaaatcattgattctgagagttcttgctagctcaatggtttcagtggaggaattgattactagagtttcttaccctgccattgttgtgtcatcatttagccattatttctgaaaatactatttctgcatcataaattaaaaccatacttagtatccacattctgtttttcattttcagtacagtgttcaataaattaatgaggtattcaacactgtgttataaaatagagtttgtgttaggtgcttttgcccaactttagactaatttaagtgttctgatcacatttaaggtaggctaggctaagctatgacgtttagtagtagatattttcaactcatgatgggtttgtcaggatgtaaccccatcataagtcaaagagcatctgtaaagacaaagtactttagaaaaaaatacagtgataggatgacaagatcagaaaagagattaagcataggtaggtttgctgtagtgctgttgaaatctaaccttctaaaaacggtctgccaaacctgcatctgctcctccttgtaaaagaagtgaaaggtaatataatattatcaagaatataaaattaaacagacgggaactcttgtaactcagtacacaaaatttctaaaacatggccttaaaggctaagcatgtctgtatttttcctttctgtcttgacagaaaaaaatctaacctttctataggtcagactaagcaagttctattaattagcccaaacttcaataggacagattatctgagaatgttcttacttgtagggcactttaattgaaataagactaattctgactcctgattttacgggtgagaaagttgagatccaacaaaattaattaccataaagaacaaaaatctgattgccatttttgttcctttttcaatatacttagtagcccttcctcaaagaaagttttagcacaaaatgtattctcttacttggaattacttctgctgtttgtttctgtatataatctgaataaatataatgttaacactggaaaagttcctagaaattagctgttcttcatcttttttggatcaaagatcattttgagaattggataaaatgtgtttgctatgccctgtccatagactactgacttagatatgtaataatttctgacatagatggaaaaacccaagaccaggagatggtaattgtttgaagattcaaaagcaggtcaatgttagaagaaattagaatggtctactcatgcattacccataatagttaagttcttcatattataataatgagatagttttctttcctgtttgccttcccctcctctacactttacaatactagtatcagttttctgagttaatctgcatgttctctgctatatggagacttcttcagtgtatcctcatcatagttagaacttgatttttactcttatttacacatttagttttgccttaatgactgcattgttttccattttatgaaagtcccatttgtttaacctgtctccaatatagaagcttaaatttaaaatatatatgtatgttacattcagtactatggtaaacattctggtacataactgttctgcaagtatatgtgccagaaattcctagaaataaaattgctgggtgaaagaggaagcacaaaaaaaaatttgtatgaattactgtttgccttccaaaaagattgaaccaatttgtacctaaccagcaaaacatacagttcatgtttctgtgtaacctcgccatttttaacccttcttttgtgatctttgcaagtctggtaactggaggtatcttacttttatttaatgtgtatgtcattaagtattagtgcaattgagctcaatattgttaagatgtcagtttgccccagtgtgacatatatattcagtgtaatcatgatcaaaatcccagcatattttttgtagatattgacaagctaattctaaaacttatgtggaaaggcaagtgaactagaagagcccccaaaatttgaaatggaaaaagaggaacaaagttgagaattcacactacccaattttaatataaggctacataagtcaagccagtggggtcctggccaaaggataaacatataattcagtgagacagaatagagagctcagaaatagacccacacaaatattatcaactgactgttggcagaagctaaaaagaaattccacaggaaaagggtagttttttcaataaatggtactggaacaatgaacagctttatgcaaaaaaaaaaaaaaaaaaaaagaccctcaatacgtcaacatgtaccacacaacttgtacaaaaattaactcagaatgcatcatagaactaaaatgtataacataaaactataaaacttctagaagaaaacatttaagaaaatctccataattttgacttaggtgatgagtacttaaaattgacaccaaaaacacaactcattaaaacttttttgagaaattggactttattatcaaaagtttaaacttttaaactttcactctaagaaaggcactgttaacaagaatgaaaagtcaagtgctgaatgggagaaaacatttggaaattccaagtccagcaagtgacttggattatccaaaatatacaaaggactctgaagaacttgccagtaagtgtgataggaagaataatgcccccacacccccatcacccaaagatgcctacatcctaatccaaaagggagtgatgatgtagaagaggaagtcagagatacgatgtgaaaaagactcaatccaatgatgttggcttggaaaatgaagaaagagaaatatgagccaaggggcaggcgtgatttctagaagctagaaaaagcatggaaatggactttcccctagaacctcaagaaaggaacacagtcctactgacaccttaattttaggccagggagatgtctgacaaatttctaacatgcagaactgtaagatagtaaatttgtattgttttaagacaccatatttgtgacaatttgttacagcagtaataagaaactaatataggaagaaaacaaaaaagctaattgaaaaaaaaaaagacaaaagatctgaataggtacttctccaaagaagatatatggatggcaaacaaggatatgaaaagatacttaacatcatttatcattacagaatggaaattaaaatcacaattagatgctatgtcatagttgttagaattgttacaaacagacaataaataaataatggcaaggatctggagcagcaggcattctcatttattgccagtgggaatgcagaatggcatagccactttggaagtcagtttgatagtttcttaaatatcacttctgggtatttacctaaatgtattgaaaacttttgttcacacagaaacctatatgcaaatgtttatagcagctttatttataaattgacaaaaactaggaacaaccaagatgtctttcagtaagtggtacagtggaatactactcaaccatgaagtggagtgagttggttattcctgcaacaacatgaataaatatcacatgcattttgctgagcaaagctagaactaaaaggcagtgtatagtattattccatttacatgacataccggaaaaggcagctaataagaacagaaaacagataggtggttaccaggaggtgggggaggggtcagctgcaaaaggggtgtgatagaactgttgttctgtgtggtaatgggatggtagatggattctatccattcatttgtagaatgaactttcctggtgtaaattaaaaaatcaaccaaaatgtcaggggatcccaggatgaaatggaaactataactgatgaatctaactatattataaatgcatgacatatcttaatgaaagtggtaggggggaaaggaactgacctaagtaactttggaaaacaggtaatgttttgactggataatgtaagactaaagacaaaaacattgaactctagttggtaaatttgtttcttacaggtacagattagcagtcctaaaactactctacctctattctaggaatgaacaataagtgaacatattgtgggtgtttagagccaagtttctctctgtcagagtaagaagttacaagtaaacaacagggaaactagaatgaactctggctctggagagatgtatgagcagagattcatgtttattttaatatgtatatggataaatatatatagaactaacctcagatatgagtggatacatggcttagtgtacatgtgtgtaaaggcctagaagcagtgtcaccccggtagctacagactcattcagcgtctaccctaatcttggtttctgcataccatttttcaataaaaggaagcagggcttcctggagaaatggctaatgctgcatctgggacaggtaaaatacaagatgagcctggagtatcttatggggtcagaaagtaaggaggtactttttttttttttttaaagcacggaacagtttcagcaacaaaatgggatgttatattttactcagaaaacatccttcaatccatactgatataaacaaatgaattgatgaattcttcggagaaaacagacaaatcttccttaaggaataatttttaataattatataaatactatccccttctggaggtgagcttttctctctccttgtggactggacttagtgatttgtttccaaagaggacaatatggaaaagaaaaaaggaataactttatagttaggaaatcagtcagactccaccttagtcaagtgttaagtgttaaaatcaccagtgataactcatgtggtagcacatctgtggtattagtcccataacccacaatcccagcctgatcatgagaacatattaaaactcagattgaaggaaattttacaaaatatgaaatacctgattactactcttcacaagtgtcaaagccataaaaaacaaggaaaagtctgaaaagctatcagattggagagaccaaggaaacacgacgattaaatgcaaatggaatcctagattggatcttagaatcaaaaaaagatattagtgggaaaactggtgaaatacacataaagtctgtaattcagttaataatattattgtaccagtattaatcatttaattttgacaaatgtaccttgattatggaagatgctaacgttaggagaagctcaatagaggatatctgggaactctctgtactctctttgcaactttcccgtaactttaaaattgtttcaagacaaaatgtttatttaataaaggtacattctgtcaacaaatatttatgcaaatgaatgagcatctcttcgttgatcatccttttattaattgcctattataatctttgtccattttttaggttaagtgcactattacatgttattgctatctgtggcttgttttgggctctttataaattatatcaatacctgaaaaagcttgtttatattatttacacactatttttgagactttgtgttctaaaaggaaggcttattttaaaagttggttgttgtcttctctgctttagatgctgggagcttttgcacatgctgtctcaatccatgttaggtatgtgatgtttacccactttgcagataagaaaactgaaactcgggggttaacccatttatgccggcggctgcaaaatttttttttgtgaaaaatcagaccttggcgatgaccttgagcagcaggatataaataactcccacaagcttagcgttccaataatggaacattgggcataaatgttaataacttgccaaaaatgaaatttagcagggacaggatttaaatgcagttcttgctttagtctcctttctttctaatatgataatttgcctttcctgcaatataataggaaaaactcagagaaattattttagatgatttagaattaaatgacatagatttacaaaatgtaatataaaagaccatatcttcttttctgcttgtaagtgtgccaacttgattaaagaaatgataaaagtaaagtattggcacatgctacaacatgggtgaaacttcaaaaaatgataaatgaaataagtcacaataacccatgtgttatatagatttcatttatatgaaatgtccagagtaggcaattctaaggaacagaaagtacattattgattgccaagggctggatacagggaggcttggagaatgatggctaaggagagtggtgtttcttttgggggtgaaaactgttctaaaattgattgtggtgacagttgcacaactctgtgaatatactaaaagtcactgaataaacactttaggccaggcgtggtggctcaagcctgtaatcccagcactttgggaggccaaggtgggcagattgcttgagtccagcagtttgagaccagactggccacgatggcgaaaccctgtctctgctaaaaatacaaaaattagctgggcatggtgacacacacctgtaatcccagctacttgggaggctgaggcatgagaatcgcttgaacctaggaggcggaggttgcagtgagccgagatcatgccactgcactgcagcctgggcgtcagagtgagacttgtgaaaaaaaagaaaaaattaaaaaaacacactttaaatggggacttatatggtatgtggattatatctcaataagttgttaaaaaataattaaattgcatcagaagacaaaaagatgtacatatgactatatttactgcagcactgcttgtaatgacaaaatacttgaaacagttaatttgactcttgtgtgatatgtaacctaaggatgaaaacaacctttaaaactgtaaactgctttctgtagtgacactgtggatagtaaaaaagctgacttattctaagattacaagatttgtgttttgtgataagataataagtaattttgttggtatagcaaaactgggattttgggttctggagaaagaagaaacaatgaaagatatctgagtttcagtcaatatcctgaagcgctaaatttctactggaaatatcactataatcttatgttgactttgccttcaaaacaagtgcatatatcctagctccatccactgaataggcctagaaataagaaccacttcagcaataatgaaatgtgactacaaaagtatttattttccacttaaatgaacaagggctcctgggagaaatgtctgattcaagatctatggcaggaaatagataagtctggaataccttgttataccaaatagcaaaaaagatgtcgaaaactactaggtttgggtcaaaaagattcaggataagctgaatccaacttgaagagacttccaaaggccaaagagggggatgcagatgatatcatcttgtatgtagaaaagtctctgttgatattagagagtatcagtactaatatcaaacatgtttaaatccatgtgttcatgatcttactaaagaaaaactcccttgaaagatattagggaaaaaaatccaacatttatatccaatttgactataccagttgtaacttgaggtaagcaagtaattgagtagaggaatgttttctctatggacatatctaacaaataaatgaaggaggaaggaatgagaattagagtattaccatttttgtaatctttaatgaaataatgatcattggcaatgtagagacaaccagccattatatggctcctaaaaaaggtgtacaacatgccgggcgcattgactcacccctgtaatcccagcactttgggaggccgaggcaggtggatcatgaggtcagaagatagagaccatcctggcaaacacggtgaaaccccgtctctactaaaactacaaaaaaattagccgggtgtggtggcgggcgcctgtagtcccagctactcgggaagctgaggcaggagaatggcgtgaacccggtaggccgagcttgaagtgagccgagatcacgccactgcactccagcctgagcaacagagcgagactccatctcaaaaaaaaaaagaagtgtacaaggtaagttatgaagtaatcttgccataaaacaaaaaggcaagcctgaagtctctgtcttactaataaaatacaggaaatacagtgccaaaggaacgtgtttaaatttacagaacaagacaggttgttcaatatatacaaatttaaaatcgccctaaaagagaagacaccataagctaagttagagacaacatgaacatgcatagaacagttctataaaaaaacacaacaaactaataactgtggtttctaagggttagaatttgaggctgatgggcagaaaggaaagggtaattgctttttaatacacatttctctctgcattttgcattttgtgctgtattacttttttaaaaaacatgaatttttaagtcacaggaaaagcaccaagatattaaaagtgctacttcagtgaacatacaaatgataagtgaagtagccttattgctggtatggagaaaattgtacttgtctggatagaagatcaaaccagccataacattccctcaagacaaagcctaatccagagcaaaatcctaactctattcacttctatgaagactgagagaggtgaggaagctacagaagaaaagttggaagctagcagaggttggttcatgaggtttaaggaaagaagccatctccgtaacataaaggtgcaaggtggagcagcaagtgctggtggagaagttgcggcaggttgtccaaaagagctagctaagatgattggtgaatgtggcttcactaaacaacagattttcttttcttttctttcttttttttttttttttgagactgagtctcactgtaccgcacaggctagagtgaagtgacacaatctggttcactgcaacctctgcctcctgggttcaagtgattttcgagtctcactcagcctcccaagtgattctcatgcctcagccacctgagtagctgggattacaggcacctgccaccacgcccagctaattttttggtagagacggagtttcaccatgttggcaaggctggtctcaaactcctgacatcaagtaatccacctgccttggcctcccaaagtgctgggattacgggcatgagccaccatgcctgactcaaaacaacagattttcaatgtagatgaaacagtcttctgttgaagaaaatgccatctagaactttcctagctagagaagagaagtcaatgcctggcttgaaagcttcaaaagacaggctgattctcttagtacaggctaatccagctggtggctttaagttgaagccagtgctcacttaccacctgaaaatcctagagccattaagaattatgctaaatctatcagtgctctagaaatggaacagcaaagtctggatgacaggacatctttttacagcattgaacgttttaagcccactgttgagacctactggtaagaaaaaaagattaattttcaaaagattattgctcattgaccacacacttggtcatgcaagagctctggtggagatgtacaagaatattgttgttttcatgtctgctaacaacatccattctgcagtttgtggatcaaggagtggttttgactttcaggtcttatcatttgataaatacatttcataagactgcagctgccatagatagtgatttctctgatggatctgggcaaagtaaattgaaaaccttctggaaaggtttcaccattctggataccactaagaacatttgtgattcatggaagtaggtcagtatattaacattaatatattgactctgaaaggagttgattctaaccctcatggatgactctgaggggttcaagacttcaggatcggaaataactgcagatgtggttgaaacagcaagagacctgtgagattagaagtggagcctgaagatgtgactgaattactttaatctcatgataaaaatcaaacagatgagtttcttcttatgaataaacaaataaaatggtatcttgagatggaatctacttgtggtgaagatgccgtgaacgttgttgaaatgacaaaagatttagaaaattacataacattagttgataaagtgatggcaaggtttgagagcattgactccagttttgaaagtcgttctcctgtgggtcaaatgctatcaaacagcattgtatgttgcagaggaattttttgtgaaaagaagtcaatcagtgcagcaaatttcaatgttgttttattttaagaaattgccataagccaactaaccttcagccactaccacccttatcggtcagaagacaccaacatcgaggccagaccctctgccagcaaaaaaattacagttcactgaaggctcaggtgattgttagcatttttttagcaataaagtatgttttaattaaggtgtatacattattttttagacatagtgtgattgcacaggtaatagactatagtatcatgtaaacatgtaaatgcaacaattttttttgcagacacaagtatttgtatgacttgcttgattgcagtggtgtggaacagaaactgcattatctttaaggtgtgtcggtatttgggaagagaagttctcatttcactgaatttgtagcttggaaaatataagtcttgactggtatttaggggctaccatattcaaatagctagcttgagagtgaatgaaaaaggtcaaaagaaacactgagagatggagataaactgatcctgataacattttttttacccttcggatccactcatgcctggaagaaaacctgtcagtgttttgttttgttttctttttaagcaaatactccctctgcccacacactttatgctttaaaacaaaaggccatgttgaacttgtagaaccaaatgattgctaattacttggggcgatactagtgatatattatcttacatacacacacacaaaacacacacacacacacacacacacacacacacggcttgagtccagcatggcctactgattttaaaataggaaatgacagtgtaaatgccaggataaaggacaaagtgctctgacctgttgccaaacctttttttccacagctacagtgcacctatattctataatagtcagtgcaactcttttttgtgaattgtttacatgtctgacttcttgtttggattttacttggtgatttgatatgaatttttaatgtgaaagcacttagcgttaggagtttgacattttgtctgacctgaatcaccaagaggatcatgtgaggtttattcagtgggaagagaactgttacagctctgacagaaatgatgggaaataagtaaacagccttttaaatcttcaccagaaatcaatagggtttaaagatgatggacgttggtgttttttgctgcttaaggacttcaaccttttacgggaaaatatcttctctacgtgtcagcagttttttccatgcacacaatgaatcgctgctgcaaatagaacattctgcatagaacactcttcatcattattataagaaagaagctgtgtaagactggccttggtaatgtagagccttttggggcatttttgtatgaaaagagaggaccatatcttacaattttgttttcatcataagtgtaatttatgtgccaaactttttcctcaactaaataataacagtttttatatactgagaacctcctttgtactgggcattgactgtgtgatgttttaaggtagattatttgaccccactttatagatgacaaaattggagcccagaggctctaagttcgtctgactagtgatagaactgatacttaaaaccctagtccatctgagtttaaagcttatccttttactactttccagctgtgtctctgaggacaggcactcaataggtgttcttgcccttggttctatttcttcggtagtggtatctcttattttctttctccttttccccctagtcagtaaaactaatataagtgatggccttcacatcatttaataagaggataagagctacatcatggtcattgaataaaagaatatgggttaagaactgcttcccagtatactctgcagatttgatttattatgaatgatttatgagatattagattgctgtatagtagttagcagtgtattcacaatcagctgcactctaatgccaagtgttgaaatattaactgaacgtatcatgtagtgtcctttgtttataacataataatcttgactttacaaaatagttaactttccagctgtttaatttgtacatatcattgtacaactgttatctttgagaaagcagcttatttattttgtgatttggaaatagtctttgtaattcaaactaagaaaatcaacttagttttgtaataataaatatcatggaacatacactgctaaataaaaattttcacataaaacctcctgatttgatgttattttacatttaaaggcacattacttaattggaatttttataaaggaaataagatagcttcttaccagtttattgtaatacatgtaatatgttagatatgtcgaatgcaattactatcagatgaacagttcttttcctactctttcatgaatctgttttagagcagtcacttaatgtttgtcgtttttcatttccttattaaaactgaaataaatgaaatgacctgagaatccttctaactctaaaattgtgtaactttttaggcttagaattttgacttgaagtcattttttccttcacatacttctaattaataaaaccttaaaaataatttttgttacagcatttctaaatgttcttcttcctagcccttaaagcagatatttttctaatatccagttgccttctttgaattggcaatactgtgttacacacctgacttgcgctcatctcaaatagaatatcttacctttgtttttcattaaaatacacacacacatatagaatatatgtggcattgtgactccaggcaccttcaggtgtcagtaaaggaatgatgattaatcagccattttcttgtgtttctgggagcctgaagttttcaggtacatgaggattaattctatatttgataaaagagccagttgatcagttcgaataggtaattaactgctaagcttgtaagaaacatttcaacttgtgatgagaggatgatccttaggcaatctcagtgtggcagaagctataatcaatgtatgcatctcagataaaattatagtctcatctaccctttgctcaacatttttacactgacccagtacctctaaaaagagaatgtagtagaaatcaggaatcctctgttctagtgtgactctgcccctaattttctggtcacataaattggaaggtcacataaccttttaaggcctgagctttcttgtctgcaaaatgagggtgatagaacctattaaacagttattgtgggaattattttagttaacatatgtgaaagaatttgaattcttaaataacttctgctttgccagacaatttaggtatcttatttgctagtacaagtttttgtaacctggatttggtgtgtaaccttagatagactgtagcattttgggtatgatcagatgtaacctctttaaagaaaaaaaaaaaaggaacagctgaatttatttacttcttgtttcaaggaagaaaatcgtagttgcctctcctatcaagtaaacatgtccatttttaaaagacagtcagctccccaacagggattataaattgaacaaatgaaagacggcttttcagaataaagtattcaatttaattcattttcttttcttgtttgactttgaacttttaatcttcttggtaaatatcaaaggaattccctagttactttgcatttacattttgcattggttactgtcatggactgcatatttgtgtgccctcaacattcatatgttgaaatctaatcccaatatgatggtatttggaggtgggacctttaagaggtaattaagacatgagagtggaaccttcatgaaagacataagtgcccttataaaaagatgccaaaaagctagcccactccttccaccatgtaaggagagaatgaaaaattggtagtctgcaacccagaagagggccctcaccagacctgactatgctggcatccttatattggacttccaatcttcagagctgtgagaaataaatttctgttgtttctaagccacctggtctatggtattctgttacagcagcctgaactaagacaattacagttgacccttgaacaacacaagtttgaactgtgcatgtcaacttctacattattttttctctgttcagtcaaggatggaaaaatacattattaatgtaatgcaaaacctatatatgtggagggccagctgatatggtgtggctgtgtccccatccaaatctcatcttgaattcccacatgttgtgggaggaacccagtgggaggtaagtgaatcatggggcaggtctttcccatgctgttctcatgatagcaaataagtctcacaacatctgatgatattataagggggagtttccttacataagctcctctcttgcctgctgccatgtgagacgtgcctttcaccttttgccatgatcgtaaggcctccccagccacttggaactgtaagtccaataaacctcattcttttgtaaattgcccagttgtggttatgtcttttttttttttttaattatactttaagttttagggtacatgtgcacattgtgcaggttagttacatatgtatacatgtgccatgctggtgcgctgcacccactaactcgtcatctagcattaggtatatctcccaatgctatccctcccccctcccccgaccccaccacagtccccagagtgtgatattccccttcctgtgtccatgtgttctcatagttcaattcccacctatgagtgagaatatgcagtgtttgtttttttgttcttgcgatagtttactgagaatgatgatttccaattccatccatgtccctacaaaggacatgaactcatcattttttatggctgcatagtattccatggtgtatatgtgccacattttcttaatccagtctatcattgttggacatttgggttggttccaagtctttgctattttgaatagtgccacaataaacatatgtgtgcatgtgtctttatagcagcatgatttatagtcctttgggtatatacccagtaatgggatggctgggtcaaatgatatttctagttctagatccctgaggaatcgccacactgacttgcacaatggttgaactagttcacagtcccaccaacagtgtaaaagtgttcctatttctccacatcctctccagcacctgttgtttcctgactttttaatgattgccattctaactggtgtgagatggtatctcattgtggttttgatttgcatttctctgatggccagtgatgatgagcattttttcatgtgttttttggctgcataaatgtcttcttttgagaagtgtctgttcatgtccttcgcccactttttgatggggttgtttgtttttttcttgtaaatttgtttgagttcattgtagattctggatattagccctttgtcagatgagtaggttgcgaaaattttctcccattttgtaggttgcctgttcactctgatggtggtttcttttgctgtgcagaagctctttagtttaattagatcccatttgtcaattttggcttttgttgccattgcttttggtgttttggacatgaagtccttgcccatgcctatgtcctgaatggtaatgcctaggttttcttctagggtttttatggttttaggtctaacgtttaaatctttaatccatcttgaattgatttttgtataaggtgtaaggaagggatccagtttcagcttcctacatatggctagccagttttcccagcaccatttattaaatagggaatcctttccccatttcttgtttttctcaggtttgtcaaagatcagatagttgtagatatgcagcgttatttctgagggctctgttctgttccattgatctatatctctgttttggtaccagtaccatgctgttttggttactgtagccttgtagtgtagtttgaagtcagggagtgtgatgcctctagctttgttcttttggcttaggattgacttggcaatgcaggctcttttttggttccatatgaactttaaagtagttttttccaattctgtgaagaaagtcattggtagcttgatggggatggcattgaatctgtaaattaccttgggcagtatggccattttcacgatattgattcttcctacccatgagcatggaatgttcttccatttgtttgtatcctcttttatttccttgagcagtggtttgtagttctccttgaagaggtccttcacatcccttgtaagttggattcctaggtattttattctctttgaagcaattgtgaatgggagttcactcatgatttggctctctgtttgtctgttgttggtgtataagaatgcttgtgatttttgtacattgattttgtatcctgagactttgctgaagttgcttatcagcttaaggagattttgggctgagacaatggggttttctagatatacaatcatgtcatctgcaaacagggacaatttgacttcctcttttcctaattgaataccctttatttccttctcctgcctaattgccctggccagaacttccaacactatgttgaataggagtggtgagagagggcatccctgtcttgtgccagttttcaaagggaatgcttccagtttttgcccattcagtatgatattggctgtgggtttgtcatagatagctcttactattttgagatacgtcccatcaatacctaatttattgagagtttttagcatgaagggttgttgaattttgtcaaaggctttttctacatctgttgagataatcatgtggtttttgtctttggctctgtttatatgctggattacatttattgatttgcgtatattgaaccagccttgcatcccagggatgaagcccacttgatcatggtggataagcgttttgatgtgctgctggattcggtttgccagtattttattgaggatttttgtatcaatgttcatcaaggatattggtctaaaattctctttttggttgtgtctctgccaggctttggtatcagaatgatgctggcctcataaaatgagttagggaggattccctctttttctattgattggaatagtttcagaaggaatggtaccagttcctccttgtacctctggtagaattcggctgtgaatccatctggtcctggactctttttggttggtaaactattgattattgccacaatttcagctcctgttattggtctattcacagattcaacttcttcctggtttagtcttgggagagtgtatgtgtcgaggaatttatccatttcttctagattttctagtttatttgcgtagaggtgtttgtagtattccctgatggtagtttgtatttctgtgggatcggtggtgatatcccctttatcattttttattgtgtctatttgattcttctctctttttttcttcattagtcttgctagcggtctatcaattttgttgatcctttcaaaaaaccagctcctggattcattgattttttgaagggttttttgtgtctctatttccttcagttctgctctgattttagttatttcttgccttctgctagcttttgaatgtgtttgctcttgcttttctagttcttttaattgtgatgttagggtgtcaattttggatctttcctgctttctcttgtgggcatttagtgctataaatttccctctacacactgctttgaatgcgtcccagagattctggtatgttgtgtctttgttctcattggtttcaaagaacatctttatttctgccttcatttcgttatgtacccagtagtcattcaggagcaggttgttcagtttccatgtagttgtgcagctttgagtgggattcttaatcctgagttctagtttgattgcactgtggtctgagagatagtttgttataatttctgttcttttacatttgctgaggagagctttacttccagctatgtggtcaattttggaataggtgtggtgtggtgctgaaaaaaatgtatattctgttgatttggggtggagagtagtgtagatgtctattaggtctgcttggtgcagagctgagttcaattcctggatatccttgttgactttctgtcttgttgatctgtctaatgttgacagtggggtgttaaagtctcccattattaatgtgtgggagtctaagtctctttgtaggtcactcaggacttgctttatgaatctgggtgctcccgtattgggtgcatatatatttaggatagttagctcttcttgttgaattgatccctttaccattatgtaatggccttctttgtctcttttgatctttgttggtttaaagtctgttttatcagagactaggattgcaacccctgcctttttttgttttccatttgcttggtagatcttcctccatccttttattttgagcctatgtgtgtctctgcatgtgagatgggtttcctgaatacagcacactgatggatcttgactctttatccaatttgccagtctgtgtcttttaattggagaatttagtccatttatatttaaagttaatattgttatgtgtgaatttgatcctgtcattatgatgttagctggtgattttgctcgttagttgatgcagtttcttcctagtctcgatggtcttgacattttggcatgattttgcagcggctggtaccggttgttcctttccatgtttagtgcttccttcaggagctcttttagggcaggcctggtggtgacaaaatcggtcagcatttgcttgtctgtaaagtattttatttctccttcacttatgaagcttagtttggctggatatgaaattctgggttgaaaattcttttctttaagaatgttgaatattggcccccactcttctggcttatagggtttctgcagagagattcgctgttggtttggtgggcttccctttgtaagtaacatgacctttctctctggctgcccttaacatttttttctgcatttcaaccttggaggatgtgacaattatgtgtcttggagttgctcttctcgaggagtatctttgtggcattctctgtatttcctgaatctgaatgttggcctgccttgctagattggggaagttctcctggataatatcctgcagagtgttttccaacttgtttccattctccccgtcactttcaggtacaccaatcagacgtagatttggtcttttcacatagtcccatatttcttggaggctttgctcctttctttttattcttttttctctaaacttcccttctcgcttgatttcgttcatttcatcttccatcactgataccctttcttccagttgatcgcatcggctcctgaggcttctgcattcttcacgtagttctcgagccttggttttcagctccatcagctcctttaagtacttctctttattggttattctagttatacattcatctaaatttttttcaaagttttcaacttctttgcctttggtttgaatgtcctcctgtagctcagagtaatttgatcgtctgaagccttcttctctcagctcgtcaaagtcattctccatccagctttgttccgttgctggtgaggaactgcgttcctttggaggaggagaggtgctctgcgttttagagtttccagtttttctgctctgttttttccccatctttgtggttttatctacttttggtctttgatgatggtgatgtacagatgggttttcggtgtggatgtcctttctgtttgttttccttctaacagacaggaccctcagctgcaggtctgttggaataccctgcagtgtgaggtgtcagtgtgcccctgctggggggggcctcccagttaggctgctcgggggtcacgggtcagggacccacttgaggaggcagtctgcccgttctcagatctccagctgcgtgctgggagaaccactgctctcttcaaagctgtcagacagggacatttaagtttgcagaggttactgctgtctttttgtttgtctgtgccctgcccccagaggtggagcctacagaggcaggcaggcctccttgagctgtggtgggctccacccagctcgagcttcccggctgctttgtttacctaagcaagcctgggcaatggcgggcgcccctcccccggcctcgctgctgccttgcagtttgatctcagactgctgtgctagcaatcagtgagattccgtgggcgtaggaccctccgagccaggtgtgggatataatctcgtggtgcgccgttttttaagccggtctgaaaagcgcaatattcgggtgggagtgacccgattttccaggtgcgttcgtcacccctttctttgactcggaaagggaactccctgaccccttgcacttcccaggtgaggcaatgcctcgccctgcttaggctcgcgcacggtgcgtgcacccactggcctgcgcccactgtctggcactccctagtgagatgcacccggtacctcagatggaaatgcagaaatcacccgtcttctgcgtcgctcacactgggagctgtagaccggagctgttcctgttcggccatcttcgtggttatgtctttatcagcaatgtgaaaatggaccagtatagtaaatgggtaccaggagagtggggcactgctgaaaagagacccgaaaatatggaagcaactttgcaactgggtaacaggcagagactgaaacagttttgagggctcagaagaagataggaaaatgtggaagagtttggaactccctagagacttgttgaatggctttgaccaaaatgctgataatgatatggacagtgaaatccaggctgaggtggtctcagatggagatgaggaacttgttgggaactggagcaaaggtgactcttgttatgttttagcaaagagactgccagcattttgaccctgccctagagatttgtggaatttgaattcgagagagatgatttaggctatctggcagaataaatttctaaacagcaaagcattcaagaggtgacttgggtgctgttaaaggcattcagttttaaaagggaaacagagcataaaagtttggaaaatttgcagcctgacaatgtgttagaaaagaatatcccattttctgagaagaaattcaagctggctgcagaagtaaggaggagccgaatgttaaccactaagacaatggggaaaatgtctccaggtcatgtcagagaactttgcagcagctgctctcatcaagcccagaggtttaggagaaaaaaaaaaatggtttcatgggcagggcccagggtccctctgctctgtgcagtctagggacttggtgccctgtgtcccagtcactccagctgtgattaaaagggcccaaggtacagcccgggctgttgcttcagagggtggaagccccaagccttggcgacttccacatagtgttgagcctgcgggtgcacagaagtcaagaattgaagtttgagtacctctgcctagacctcaaaagatgtacggaaacatctggatgcccaggtaaaattttgctgcaggggcgaggccctcatggagaacctctgctagggcagtgcagaagggaaatgtggggtcagagctccctcacagagtcccttctggaacattgcctagtggagctgtgagaagagggccaccatcctccataccctagaatggtagaaccaccaacagcttgcactgtgcatctggaaaatctgcagacattcaatgccagcccatgaaagcagccaggagggagtctgtaccctgcaaagccacagaggtggagctgcccgagaccatgggaacccacttcttgcatcatcatggcctggatgtgagacatgaagtcaaaggagatcattttggagctctaagattttacttcctcactggatttcagatttgcatggggcgtttagcccgtttgttttgtccagtttcccccatttggaacggctgtatttatccaatgcctgtacccccattgtgtctaggaaataactaacttgcttttgattttacaggctcataggcagaagggtcttgtctcctcttggatgagactttggactgtgggcttttgagttaatgttgaaatgagttaagactttgggggactgttgggaaggcatgattggttttgaaatgtaaggacatgagatttgggaggggccaggagtggaatgatatggtttggctgtgtccccacccaaatctcatcttgaattcccatgtgttgtgggagggacctggtgggaggtaactgaatcattgggcagatctttcccatgctgttctcatgatagcgaataagtctcatgagatctgatggtattataaggggagtttccttacacaagttcctctcttgcctgctaccatgtgaggcttgcctttcacctttcaccatgattgtgaggcctcctcagccacatggaactgtaagtccagtaaacttctttcttttgtaaatcgcccagtcttgggtatgtctttatcaatagcatgaaaacagactaatacaccagcttttcatatatgcaggttccacagggccaactgcaggactggaatatgcacggattttggtatatgtgagggatcctggaaccaatccccagaatacactgagggacaactgtactataggtttttatgtttaaatattttattttgatgaagtgatctttaatggttcattctagtaacccaaggatatgctttaaatttattgaagtcaataggaaaatgtgatttaatacttaagaaattgcagtaaaacaaaggaaaaaaatttcctttctgagaattcttatttgcctttgatatctaattcttatggttaccatttggcatttagtgaacccctaataatatattgaatgatacttcaagttatgttacagatctaagaatacttggccaaactgatctatgactacaaaaagaaattctgttgcagtgactcatacaacaaaaatgttcccagtttgtgagtgacgctctgtgttatatttacttccctaatatatagtcacctttcataatagtgtcagcataatatactaagacaaagaggatctactgaaacttctcttgcaaccattaggacaaacccggtataagactatgcctccagttacctgggtgaccttaccctgttaaagtcttatttataaaatgagggctgacactggattattgctaaggttctatctatctggagaaattatcaaccaggagagcttaatggtatttgtcacctattcttatttttcctaagagatctttttcatatgatagtgacatgatcattctgatgaagtccttccagcttctaataaaatctaggaaacacagttgttattcaccccatagtaatgaagaaacctgtcctgtgcactacaaggagcttcttatgttctgagaagaattgttattcacctttgatctctagtccttaaactctgtagtcggcatttaatggatgtccactaatatttagtttggtttgtgttgcatattatggaaagcactcatctatatttaatgtctatgccactgcctgtgaatttgtgggaagacaagtgtattgtaaagtcaaattcctgccactccaattttctaccagcatctaagtcctcacagctgtgctttagtgccccaaatttgttattaagcccataatcccagctacttgggaggctaaggccggagaattgcttgaacccaggaggtagaggttccagtgagccaggatcacaccgttgcactccagactggacaatagcagtggaactcagtctcccccaaaaaaaaaaaaaatagacatttttatacatatcacggacaggttttatatatgatcttgtttcttgtggactgtaagctacttgaggttaaaagctctactttatttatttatgtccctccactgtttactactacttagcacatatacgacaatcagttacatttactaagttgatgattataaggaatcacacacgatataatagctgagttgttaatgaaaaaaaaatcagtttctttgtaatgattcctctctaccagaaaaacaatcaagaacccgttgtatgtggtagcttatgtaagagggaagcttctggaaaagcacctgccaattgtcactgttatattttcagagacaaaagacaaatatagtcacaatcactggtataattttcatgacctctaaacagttctgtattttttaatgactacagaaatttattggttattttcagtttagttttatgcagtctggcaaagtaatcagattaagtatgtatgtatcacacactttttcacttatagcagtaatcctttatctgcatcagtctaatttagtgctttgggcaatagagtaatgcagactaaatcaaagctggatatgagccaagatgatgagttggaaagatccctggctttgtaattagatagacctggattcccattaattgaggtaatgaatgtaaaatactgaacacagtgcctggctcctggtaagttgccccataaatggtagctaatgttattttactttaaagagtgcatagtttttaaaataatcattaggtaggaagagctgtggtaaaggagtgaagtttgtttccttgaaagtacagtttaccagcatgcagtatatcttgttatttgttagctctgtggaaacatgcctacctaaaaaggagactcaggttctgaaacagaccaagaatgaaagcaccaactaactcttttgtgaggccttgtgcttttttattcaatggaagataacagtcatcagattggggtagggtctaatggtggcagccaactagtgtgtgttttaattgtgtgtgttgcatgatgagaggtttaatgccttaggcaagtcactagatgagctcaactctaagagtacattttctttagtaaaaataaggccaatactatttgtgttgcaaagttatgaagattgatgattatgtcagtaaaatgcccagtgcctggcattttgaaaatgctcctataaattgaaccttaatttttctcattattatcattgttatttttatataatgatctgtgtatttaaggtgggtttgtcctttgaggatcctcttcgcaatattttcctgttgcttagaaacacatcctttaaataacaatagaagctctctatgcatctgaaagtagaaatgctcttaactttttactattcccacctaagcttgtcttctaacattacttctgatctttcagaagtacgttctcttcgtgtaaaggaattatggaagagtttgctgtctggctaatcttgctatatggtagtatctgcagttttcccaagaggaatgcgttcattttgtgctatctaattgccagtcttaatgtattcatattggcaagttttcagtattctgtccctacttttttccttttccctgttggctgtggtttgactttgttcccccaaagtttgtgtgtttgaaacttcatcccaatgcaatagtgttaggaggtgggatctaataagaggtgattgggttgaataaagtaagtccaatccctggtgcctctctcttggtccctctgtgtttgcttgctattccaacatgttataacatagcacagaggcccttgtcagatgctggtaccatattcttggacttgccagcctccagaactgtgagccaaataaatttcttttctttataacttaactagtctgtgatattctgttatagcaacagaaaacggactaagagacttgtgatgatttgatttaattttactttttcctgatagttttaagattttattctaaatacactctcactgaagagttcgtaatgccatcttatattattttactctatatttttgtctttactctctatcctttgatgtacttgttgtgacaactttaatcatgtttagactggtttgtggagaagagaggatcacaacaggtacagaaataggctatagactttatatggctgttgtcagtcttttctattttattatcttggagttgaacttatgtaggacattactggctacggtaaagaaatcaaataaaaagaaaggacagttctttcaatcttgtattagatttatagcctaccaaaggaactccattgttgatgctgataaacaaatgaatggaaattcagaatggttatagtagtccagtgagctttggaaggttgtaagctttctgggccttagttttcttcagtacaaaatggacatattaactgagctttctatttccgtggattgtataaagatcagatgaaatatagttcacccttgaacaacacaggagttaggggaactgacacccccccgacacacccacacagtcaaaaatctgagcgtaactttagactccccaaaaacttacctgctaataacctactgttgactgaaagccttaccagtaaaatgaacaattaacacacattttagtgttgtatgtatttgtactatgtatgcccttaaaataaaggaaggtaggggaaaaatcatgaagagaaaatatatttactattcatttagaggaagtgggtcatcacaaaggtctttattctcatcatcttcatgtcaaggatgctggaggaggggaaggggctggtcttagtgtctcagaggtgacagaggcagaaggagtaagccgagaaggtggaaggggaggaagaagtggcaggcacatttgatgtaacttttattgacaaatatctgcatataagtggacccgcacagttcaaacctgcattattgaaaggtcaactgtaatgtgaaacacatataaaaataatgtgtctatcatcaaagcattatatacttcatgattttaaagtgttagtgaccaagtaatcctttaaggaaagagactgtgttgccatatcatacttattaacttattgttgtctgtcttccaaaaaggatttgaagcaaaagtcactaatgaagtcattgaattgaatatgttattggtgatagaagtgaagtgagaggaaatccgaggagaaatgctttgtaagaatgttgaattcatttgctacataggcagtaaatatttaggtagcacatcttcatagaaggaataaaatgtgcaaatttgattgttgttggcaaagactgatttttaaaacaactgtaatacacagtagatctaaagagatactgcctaccaaagggtaagagaaaaagattaggataataaattacaaattagcttgactttgagaatttgggggaaatgttgaaacttacagagaaagaataaatttagggaaataataatgtaaccaggatagggcctgaattttttatatctgtatgtaaagaaggagctggttcttattaacttttctgaagatctggtatgtactttaaagcctactttatcaacaacaacaacaaaactctgtgaagaaggggtggagggatgtttctaagatcttagagaaaattgtaagtatatggtagaactttaagaaaatcatctttagtacaagaaggattataatggttttggttgaagttattcagtgttgattgtgaccatgtaactaaagtttgtgattcttgaatttgtgttttttatacttatgttttacaaaaagattttatttcttcttcaaggaggttgtaagaattttccctcgattttctaaatctaatgcagaaattgttccaggctatgagtaagtagtggagggaagaaatttgagtcatgttacctccatttttagtgtctctctttagcttgtcccttcctttagtcaaggtatctgttagatttataaaaatttagaataccatatccctataatttttcatctaataatctcattgagaaaacacaggagaagttggaaagcaaatagtggtcactgagtgcttcttatgtatcaaattctagatgttaatatgtaatttaatcttcagaaagggctgttagaccataagctccttggagcacagctttgggtcttcatctatgtaatctctctaattaactgtacgtttaataagtgtatacagttagatacacagtgaatgagtaaacaagtctgtaaattattgtcctcattttagagaaaatgaaatgggtgtctaagaaattaagtctatcaatagtcccatagctactaagcggcaaaaccttaacctgtatgtagtctttttattattattattattattattattattattattattattattatactttaagttctgggatacatgtgcagaacatgtaggtttattacataggtatacatgtgccatggtggtttgctgcacccatcaaccagtcatctacattaggtatttcttctaatgctatccctccccttgccccacactccccaacaggccccagtgtgtgatgttcccctccctgtgtccatgtgttctcatttttcacctcccacttatgagtgagaacatgtggtgtttggttttctgtttctgtgttagtttgctgagaatgatggtttccagcttcatccatgtccctgcaaaggatatgaactcatccttttttatggctgaatagtattccatggtgtatatgtgccacatttgctttatccagtctatcattgatgggcatttgggttggttccaagtctctgctattgtgaatagtgctgcaataaacatacgtatgcatgtgtccttatactagaatgatttataatcctttgggtatatacccagtaataggattgctgggtcaaatggtatttctgattctagatccttgaggaattgccacactgtcttccacaatggttgaattaatttacactctcactaacattataaaagcgtttctattttttcacatcctctccagcatctgttgtttcatgactttgtaatgatggccattctaactggcatgagatggtatctcattgtggttttgatttgaatttctctaatgaccagcaatgatgagctgtttttcatatatttgttggccacataaatttcttcttttgagaagtgtctgttcatatcctttgcccattttttgatagcgttgttcatttttttcttgtaaatttgtttaagttctttgtagattctggatattagccctttgtcagatggatagattgcaaaaattttctcccattctgtaggttgcctgttcactctgatgatagtttcttttgctgtgcagaagctctttagtttaattaaatcccatttgtcaattttggcttttgttgcaattgcttttggtgttttagtcatgaagttatcacccatgcctgtgtcctgaatggtattgcctaggttttcttctagggtttttatgcttttaggtcttatgtttaaatctttaatccatcttgagttaatttttgtataaggtgtaaggaaggggtccagtttcagttttctgcaaccccgtttcttaaatagggaattctttccccattgcttgtttttggcaggtttgttaaaaatcagatggttgtagatgtgttatttctgagggctctgttctgttccatttggtctatatatctgttttggtaccagtaccatcctgttttggttacagtagccttgcagtatagtttgaagtcaggtagcatgatgcctccagctttgttctttttgcttaggattgtcatggctatacgggctcttttttggttccatatgaaatttaaagtagttgtttcctaattctgtgaagaaagtcaatggtagtttgatgggaataacattgaatctataaattactttgggcagtatggtcattttcacaatattggttcttcctatccatgagcatgggatgtttttccatttttttgtgttgtctcttatttccttgagcagtggtttgtagttctccttgaagaggtccttcacatcccttgtaagttgtattcctaggtattttattctctttggagcaattgtgaatgggagtttgctcatgatttggctgatattggtgtataggaatgctcgtgattttcgcacgttgattttatatcctgagactttgttgacgttgctttttggcttaaggagattttgggctgagatgttggggttttctaaatatacaatcatgtcatctgcaaacaaagataatttaacttcctctcttcctatttgaataccccttatttctttctcttgcctggttgccctggccagaacttccaacactgtgttgagtaggagtggtgagagagggcatccttttcttgtgccagttttcaaagggaatgcttccagtttttgcccattcagtatgatattggctgtgggtttgtcataaatagctcttactattttgagatatgttccgtcagttcctaatttattgagtgtttttagcatgaaggggtgttgaattttatcaaaggctttttctgcgtctattgagataatcatgtggtttttgtcattggttctgtttatgtgatggattacgtttactgatttgcatatgttgaaccagccttgcttcccatggatgaagctgacttgatcgtggtagataagctttttaatgttttgctggattcagtttgccagtattctattgaggatttttcgcatcgatgttcatcagggttattggcctgaaattttatttttttgttgtgtctctgccaggttttggtatcaggatgatgctggcctcataaaatgagttagggagcagtccctctttttctattgtttggaatcgtttcagaaggaatggtaccagctcctttttgtacctctggtagaatttggctgtgaatttgtctggtcctgggctttttttggttgataggctattactgcctcaatttcagaacttgttactggtctattcagggatttgacttattcctggtttagtcttgggaagttgtatgtgtccaggaatttatccatttcttctagattttctagtttatttgcatacaggtgtttatagtattatctgatggttgattgtatttctgtgggatcagtggtgatatcccctttatcattttttattgtgtctatttgattcttctttcttttcttcattaatctggctagcagtctatctattttgtcaatcttttccaaaaaccagctcctggattcattgatttcttttgaagtgttttttgtgtctctatctccttcagttctgctctgatcttagttatttcttgtcttctgctagcttttgaatttgtttgctcttgcttctctagttcttttaattgtgatgttagggtatcaattttagatctttctaggtttctcctgtgggcatttagtgctataaatttccctctaaacactgcgttagctgtgtcccagagattctgggacgttgcgtctttgttctcactggtttcaaagaacttacttatttctgccttaatttcgttatttacccagtagtcattcaggagcaggttgttcagtttccatgtagttgtgcagttttgagtgagtttcttaatcctgagttttaatttgattgcactgtgttcagagagaccatttgttatgatttctgttcttttgcatttgctgaggagtgttttacttccaattatgtgatcaattttagaataagtgtgatgtgatgctgagaagaatgtatattctgttgatttggggtggagagttctgtagctatctattaggtctgcatggtccagagctgagttcaagtcctgaatatccttgctaattttctgtctcgatctgtctaatattgacagtggagtgttaaagtctcccattattattgtgtgggagtctaagtctctttttaggcctttcagaacttgctttatgaatctgggtgctcctgtattgggtgcatatatatttaagatagttagctctccttgttgcattgatgcctttattattatgtgatgcacttctttgtctttgttgatctttgttgatttaaagtctgttttatcaagggcgaagattgcaacccctgctctttttttgctttccatttgcttggtaaagcttctcccatccctttattttgagcctatgtgtgtctttgcatgtgagatgggtctcctgaatacagcacactgatgggtcttgactctatccagttttccgtctgtgacttttaatttgggcatttaacccatttacatttaaggttaatattgttatgtgtgaatatgatcctgtcattatgatgctagctggttattttgcccattagttgatgcagtttcttcaatgtcagtggtctttacattttgatttgtttttgcagtggctagtactggttgttcctttccatatttagtgtttccttcaggagttcttgtaaggcaggcctagtggtgacagaatccctcaatatttgcttgtctgtaaagaattttatttctcctttacttatgaagcttagtttggctggatatgaaattctggcttgaaaattcttttcttgaagaatgttgaatgttggcccccactctcttctggcttgtagggtttctgcagagatccactgttagcctgatgggcttccctttgtgggtaacccaacctttctctctgtctgcccttaacattttttccttcatttcaaccttggagaatctgatgattatgtgtcttggggttgctcttctcaaggagtatctttgtggttttctctgtattttctgaacttgaacgttggcctgtcttgctaggttggggaagttctcctggataatatcctgaagtgtgttttccaacttggttccattcttcccgtcactttccagtaccccaagcaaatgtaggtttggtcttttcacatagtcccatatttcttggaggctttgttcattctttttcattctgttttctctaatcttgtctttacactttacttgattaagttgatcttcagtctctgatatcctttcttccgcttgattgatttggctattgatacttgtgtatgcttcacaaacttctcgtgctgtttttttcagctccatcaggtcatttatgttcttctctaatctagttattctagttagcaattcctctaaccttttattgaagttcttagcttccttgcattgggttagaacatgcttcttgagctcagaggagtttgttattacgcactttctgaagcctccttctatcaattcgtcaaactaattctctgtccaatttagttcctttgctggcaaggagttgtgatcctttggaagagaagaggcattcaggtttttggcattttcagcctttttgtgctgtttttttcctcatcttcgtggatttgtctacctttggtcttcgatgttggtgaccttcggatggagtttttgcttcgttgtccttttttttttatgttgatgctattgctttctgtttgttagttttccttctaacagtcagacccctctgctgcaggtctgctggagtttgctgggggcccacaccagaccctgtttgcctgggtatcaccagcagaggctacacaacagcaaagattgctgcctgtttgttcctctggaagcttcatcccagaggggtaccggccagatgcgagccggagctctcctgcatgaggtgtctgtcgacccctgctgggaggtgtctctcagtctggaggctcaggggtcagggacccacttgaggagacagtctgtcccttatcagagctctagcgctgtgctgagagatctgctgctctcttccaagccggcaggcgggcacatttaagtctgctgaagctgcacccacagccaccccttcccccaggtgctctgtcccagggagatgggaactttatctataagcccctgactggggctgctgcccttcttttagagatgccctgcccagagaggaggaatctggagaggcagtctggctacagcgactttgcctagctgcagtggattccacccagttcaaaattcctggcagctttgtttacactgtaaggggaaaactgcctactcaagccttggtaatggtggattcccctccccccacaaagctcaagcatcccaggtcgacttcagactgctgtgctggcagcgagattttcaagccaggggatcttagcttgctaggctccgtgggggtgagatctgctaagctacactacttggctctctcacttcagccccctttccaggggagtgaatgattctgtctcactggcgttccaggtgccagtggggtatgaaaaaaaaaaccctgcagctagctaggtgtctgctcaaatggccacccagttttgtgcttgaaacgcagggccctggtggtgtaggcacccgagagaatctcctggtctgtgggttgcaaagactggaaaatcgtagtatctgggctggagtgcaccgttcctcaaggcacagttcctcagggcttcccttggctaggcgacggaggtccccaaccccttgcacttcctgggtgaggtggtgccccacccacccttcttcggctcgccctctgtggactgtacccactgtctaaccagtcccaatgagatgagccaggtacctcagccggaaatgcagaaatcacctgcattctgtgttggcctcgctgggagctttttgtttgtttgtttgttgtgttcttaatgagttggagttttgctgtttttgcccaggctgaagtgcaatggcacaatctcggctcactgaaacctccacctcctgggttcaagtgattctgctgcctcagcctttcgagtagctggggttacaggcatgcaccaccaggcccggctaattttgtattttcagtagagacaggatttctccatgttggtcaggctggtctcgaacacccaacctcaggtgatccgcccgcctcagcttcccaaagtgctgggattacaggggtgagccaccgcgcctggcctgtcctctttaattatcttacatatgtcagttatgaacttgatttttcagcaccctgcaattcattcactcagaaagagaacataaatgcaatagtcaaaatagttttcatgtagagggtgaaatataagactatccagaatgttgcctttttacttctgcttcattgccacattacatcaatggttgagtaacagttatacctctgaactattttccacagaacagaaatgacctgttaggagcattatctttgcttttgaataatgatagtggtcaagagcttgaactaagtagttagacaaacttagtctcagtcatgctactaactggctctttttctttaggcaaatttcttttgtctaaagaacctctctaagcttcacttttgccataaaatgggaataataatacttaccttataggtctaatgtgaggatagagataatatgcttagctcaataactcgcatatagaagatgcttgttaagagttagttaaaattggatgtttctgttgatgatgttgtcattgctattacaaatattattatcaactttgaatatagtgatttaatttttccattggtcccctacaccaaggaaaagtcattgggaaataatcacagggagtgtatttatataaatgatggcctttattacatattgtacgttgataaaatttgcttcttagcatgttgtgagtacctttaaattaaaacttttggagaggataaaacaattttctttatttaaaaaattttccagccgggcgcggtggctcacgcctgtaatcccagcactttgggaggccaaggcgggcagatcacgaggtcaggagatcgagaccatcccggctaaaacggtgaaaccccgtctctactaaaaatacaaaaaattagccgggcgtagtggcgggcgcctgtagtcccagctacttgggaggctgaggcaggagaatggcgtgaacccgggaggcggagcttgcagtgagccgagatcccgccactgcactccagcctgggcgacagagcgagactccgtctcaaaaaaaaaaaaaaaaaaaaaaaaaattttcctgggactggcatggtggctcacacctgtaatccccaacactttgggaggctgtggcaggaggatcacttaagcccagagttcaagaccagcccagggaacatagcaaaaacctgtctttacaaaaatatatatacatatatttttaaaagattagctgagtgggtatggtggcacacaccctgtagtactggctacttaagaggctgaaataagagaatcacttgagcccaggagtttgaagttccagtgaactgtgatcacaccactgtactccagcctgggtgacagagtgagaacttgtctcaaaaagaaaaaaaaaaaatttattctatcttatatctttgacttgcaaaagcctatatttttagaatcagtttttttagacattagtctgatacagaaaccaaggttctctgcagcagaccattctgaggttgtggggatattgttggaaaaaaatatgattaggatttattatacattcttacctttatttgttttttgtcagagaagcagtcacccctgattgttgctttaggccatcaattgatgtgcactgcaaggggtaaattgttctacacattagtaagctgggtaagcaaattgttgtgcaaacctaatttgtttcctagagaaagtgactgacatacaattttgaaaatggaaatattcataaattgggtgaccatggtggaatagatccattgtgaaataaccactacgtttaagaatcctgtactcattggtgagactgacaaaaaacagtactgtgactgaggtaaacacaaggttacagcagcccttaagaggagtactttcctcaggcttggggaaggtaggacagacaggagagaggaatcagaagtcttcacaatattgatatctattctgggccttgaagatgaagtgggagttggctaggtagatggaaggtaggaggggaagggggtaaatttttccaggttgtgagagcaacatgtttgaggaactataagataggggaatagaatgagaatactgggtgttagagaagaatgagatttttctagatgtaacttttttgcactatatagcccaccagttagagggtctgttttgtgaagaaactagtcagttcagaggaggaaaatgatggaagtagtattcattaaactaaatattttattctgttgacttggtcaatcaagtcagacttggagcctgataatccatttgggcatcgatttgtctttattgttaactttgtaacttggaaaaattttttcaaaatcttcacatggttctcaatactggttttacaatataatcacacgaggaagttttgtaaaaataacactgtggatttgctgtaaaatgtcccaatggaaattttttttaatgtttgggggtggggaaatagatgatgtaagatttgcaaaatattgctaatcactgacacttggtaatatatttccattatgtttgtatatgtttgagcatttacataactaaaagtttaaaaagtaaaattagaattttttctgaacagccatcaaaagatactcatacttgggccccatcctaaaccaattaggtcaaaatttcttggggtttaggacccacgtatcttttgtttgtttgttgttgttgttgttgttgttttggagttcaacatgtttatggtgtgtagccatggttgaaagcttttattttataagatagacaaagcaggaattattattctcattttacaggagaaaaacagaagggctatgtggtttgttaaaaggccacacagacagtaaagaacacagcctttacatggtcagcctcacattctagtactcattttattacactgctcttcttctctgttgcctggtatcaaaggaattagtttgttgctagttagtatcacatgatatgttcagaactatactatattgaagatcttagtccctacgactctgttctagagcatccctagttcctgttcttcctcagactggcagtgagtattgagtgcaagcaacaaagtttgttaaattgctcttatttgtgagtggatgcttatagttcagcctgccattttttttttcttggcctgtgagtaagaaagcaagcagtgtaagtgcctctaagaaggaaaagatgctgatacttttctcatgccctctgtgctagggcagtaaatctacatgcaaattaaagattttggtgacaaatgagaacacccatcatgactctagtctcttcttaactttcctgggtgttgttaattcataacatagtttgaattcacttactattattgatttctatatttattagaatgaaaagggaaatcttgccttacaagggaaatatggttatcagacgctttctttgtcatggaataaaaagaccttctaggatataaactgtgagaatgacagttaaattgatatggtgaaggttaatgcgtgcttgctgcattgatgttggaggtcccaatcatttaccactatgctcctataatacatgccgtacatcttcattaggaaggcacagagcaatcagtttcaggtttctggatgagcctgtggccaggccataattaaccttttgaacttggaattgtagcagaatgttctattggcttaggttatcaattatggttagagtcgattgatattcaaagaaggcttattggtgatagatattataatttactcatctgcctgttgtgtgcttgacaaatagaaatgtcataacaaataattttgttttttgcttttggaaagagattatttgccaaacagttctataagcaacagctgttgttcaggttttttcttgaggtgggggagggtcttaattttcagtattgtttttcagtttcctatgtatgaagcagtgcaactaataaggggacttttagagttacatatgtcaaattttactagaaaaaaactcacacatagcatatcaacatactttaaaaataagtctaaaaaattaaagttcaagtgaaatcatgtattttatttatttatttattttgagacgaggtctcactctgtcacccaggctggagtgcagtggtacaaacacagctcactgcagcctcaaactcctcggttcaagccgtcctcctaccttaccctcccaaacagctgggaccacagccgtgcatcaccacgccctgatgatttttttatattttgtaaagatggagactccgtatgatgtccagctggtctcaaactcctgaactcaagtgatccacccacctctgcttccaaaaatgctggaattacatgcatgagccaccacccccagatgttaaaatttttgtgtcttctttttctatacagtatttcactcaaataaaatagtatcagaaaaatggctgactgaattttgcttttttggaaaaacttgctagaatgtttgttaatcaggtaaaactgaaaatattaattgccagtccaaatgaagggaagtttgccttttttgttgttgttgttctggcaaactttattaaaaaacaaaaacaatataccaatggacagaattttctctgccacttgaggagcccctatcccaaaccaaaactactgaagctgatcacacaggtatacacatcactggtaactctataagaaataaaaggaaaaatgaatatgtctggttaccacaagcccatgtgataatgcatggctgtgtgacacagaaaacggtatacaggtcaaaaatgccttggaaaaatacaaatttttaaaatatggaatatgtagaccttaatccactcggccacatttttatattaacacatcaatgtattatatttgcggttaagtaggaaatttgccttttttatgaatttcaaattatctattatagtttaaagataactgctcaaactaagcagctgtttgtttttaagctatagttgtttattctgttaacttaccctattagttttagaaataatgttttattaaaatcaaatatgccttagaagttatttctagaaaaaagttgcactgaggttttatttattgaagttttaattgtaatttgactatgcatattgttttgaaatgacagtcgtccctcagtatctgtgtaggattggttccaagacaccccacagataccaaaatccatggatgctttggtcacttatatagaatggtgtagtatttacatttaactagtgcacatcctctcacatactttaaatcatctctaaattatttataataactaatacaatgtaaatgctacgtaaatacttgttatactatattgtttagggaatcatgacaaagagaaagtccatatatgttcagtacggttgcaaccatccatttttccccatattttcaatctgcgattggttgaatctatagaaggtccaactgtatagtgagaaattgagaacatgaatatccaacactaaggcattggttgagtatattgtgtacatcactttgaagaaatattataggtattaacatgatgataggatagagttttaataacttgggaaactgttaccttaaaagttaaaaagcaggttagaaaattgcatatttaggggtgagatgagggttattgagaaagactggaaggaagtatactaaaatgtaaacagtggtcacttagaagtggtagtattatgtcttttttcttatttatatattttatcatataaaatttttttttctgatatgtttatcagtatcatcatagcatagtgtgtaaggcctgactgcctggttcagattccaactctgttacttcctggctctgtggctctgtgacattggacaaatatttatactcttaggcttcggtttcctcatttgtagaatgggtacaagaacctatcttataggattgatatgaagattaattatatattaataataatatatttggagtttaagtaaacacataatcacataatgctgtgagtgctgtaaccttgtccgctctcttctgagcatagcccttctagtgttgtagcatagtgcacagcctgttggtttactgctcaccgttcactagccctttagccgtcatatctatcttccttctctgtgtctccatctgtatgtctcatgagctttataggggaggcaaaaacttttccctctactccttctacattttccaactgtggccctgtacattatactaccaaaagacagattaccaagggaaaagcatacaaattttacttaataacttttacatgtatacaggagccttgacaagaaaaatgaagatcaaaaagaacagggccaaaaggttatatactaggttagatatagagtattaaattgtagaaacgtgatgagacagggaagttcattttggaaaagtcactaggaagataaaggttagtttaacagagtctctttatagatttttctctacctggactcccctctctggtaataagaatgtcttttttttttttaatttttttttttattatactttaagttttagggtacatgtgcacattgtgcaggttagttacatatgtatacatgtgccatgctggtgcactgcacccactaactcgtcatctagcattaggtatatctcccaatgctatccctcccctctccccccaccccaccacagtccccagagtgtgatattccccttcctttgtccatgtgttttcttcctactggtacagggagagtttctttcacttgagagtttgatctgctttcaggaagaaaaagaaaggtcagagtattcttcttgtatctgctgttttttcagtgccgttaactcaaaatattctttatgccaaagtagcatattttggagtagcatattctgctactcatctttcttactcagtcatttctaagatataaccattcagcttctccccagacttctctcccttttgctaagtgaatgtcattcttacctcagtcacaaaatgaaagatgtggaagtcatctggatgctttatcttcctatgttcttttgaaaacctttgcttttttcttttcccttctgccacaattcagacctttatttcccatctacctcttaatgggttcccctaattctagtcttggctttccccttcccagacatcctagacagagctgttagtgcagtctctctgaagtgtcagtctttcagtgagccccatttctttcaaagtgaaacccagacctccaagacctagcccaaaacaggggttctgagctatattcattccacctctcactggctttgctgaattatttgtaactctttgatgtgctccttcactacttttgggccctcctacatgctcttccttttctctggaatgctctctaactttctgtgatttcttctctgcattaggtattcctccaaattggcttaacacatagaacaaagcaatcaaagaatttatcatactttatggtaattgtctatttccttgtctctggtcccctttaggttatgagccacttatacttagggatcatgccttatttatctctgtgcctctagtgcccagaaaaatggcagacacccaggaaacactgaatgaaaaagtaaacttgatggaaaaatagcaaattacaggtgatgggtaatgtttttataaaataatatgtatggctagttattcttctgttcttattatacatagcaaagtcatcttgtcctcaccatcacaactatcattattctcctaataacttgtttttttatttattgttcttacttctgttcatgattgtgagccatggtggatacatggagtcagaagagttagttaatgcttggtgagcagggataacagttgtcctcaatataactttgcttgtgggcatagagttaatacttgacaaagccaagaagggcctggatttttcctactttgtttcttgcactatctgtaaaatttttttcagtgtaaaattttacactatctgtaaaatattgtttaattccttgaaaattttatatcttcaataaatgtttgtaggataaaaatggcatattgtgtccaaacaaacaaaaaaaaggtaaatacttgaaagtaagattataccatggaaacaaaggatattatgcagcaagcaggtcattgtcaccacagacagacaatactattttggctatatgaactctttaaaaggaggtttatagactgtcaccagactcatgaaaaaggaaacactgattgacggatctggtaaaggaacagcagaacaagaggtgattttgtcttaacttctcttaaagagttcttataaccaaatagtattgtctgcttgtggtaacaatgacctgcttgcagcataatatcctttgtttccatggtataatcttactttccttttaagtatctgccttttttgttgggacacaatctgccatttttatcctgtaaacatttattaagatatataatttgtgaggaattaaacaaagctctataaaaaaattttagagatagtgcaagaaacaaagtaggaaaaatccagggccttcttggctttgtcaagtattagctctatgcccacaagcaaagttatataagttgccagagtcttggcttcccctttaaaacttggggataaaaatccctacttcagaatcatgtctggcatagagtagatacttaataaaagctggttttctttctttcttcctgcttccccatatagcatgtgtacagcataattgtaatcagggaacccacccaaactgcaggttgcaaatctatctgaagatgtatcactaaacaatctcctgctgaaatagtcactgtcacatcatctgcccttcatgtgatcacacatcttttccctgcctactaaactaccaatggttaatttgtttagatttgagcattcttggcaattattacccgtgctactacaacttacaaatagagaaaaattatattactcttgggatgggaatgcagtcattgtgtgtgaacagccattcatccattaactcattcatttactgacaaaaattttagtacctcctatgttccagacatggaacagacatgctccagacaaataccattaactcttataatgtaatagatattttaatcttagctgtcgtattattatccaatatcattatataccaagccaagctcttgaaataaattatttaatttatacagtggttcctccaaggtaggtgctataattaaccctcattttacagataaggaaattgagtcctagagaagttaagtgatatcctgaagttcacatagctaataaaaaaaggagctaggattcagacctaggcactttgagtctagaatgtgtgattttaacttctgtgccaggaggtctcaaagtgagtttcagggacttattagagatccccaagaccctttcagggagtcagtgagatcaaaactacttttaaaataatgctagaataatatttacctttttcactctcatgaatgtacagtgaagttttctagaagctctatgtcattatatcacaacagattgaatgcagaagcagatatgaaagaaacttataaaatgtaaaacagcaccactctaatttaaaaaggctttgtttcagaaaatacagctttttcacaaaaatgtattatttatattaacatgccatacatttattattttaaaataaattaatattttttaattctcagttttaatttctaatatggtaaatatcaattgatagaacttacataaataaaagcttcctgggttcttcaggaatttttttaaattaccaaagcgtccatgtacaaaaagtttgagaactgctactctacagtgttagaaccttcctcatatttcagaacctcatatttcagaacctttcttttggcatacattttgtattttttaagttaacctcccaatttcagacagtccagccattctgttaagaaaagccttccttacaagttgtcagaattgttagcagtaatacttgagacctttgtatattctttgaccctgtttacctgctccaggagcttacagtacataccagaatatcatgattctggtgtacttgagtcacttttaaagttaatttttatgaaatacatagaatgattttataattaaagcagattgggtataaatgtttatatttcagtatatcactggtatgacaactggtatatcactacctccaaaagtttatccagccacaaagagggaatattctgttttctttcttagataatgaaaaggctgaatgttttaatacagtttattgaataatatatttgccagcattttagaagcattatagagtatggcacactagatggtttctaacagaactgtttatttcatttaacaaacagttgttaatcatatgccagaccctttgcttaagtactagggacacagactaaatgtggtcttggttcttaaaaatcttatgagtggccaagtatggtagctcaagcctgtaatcctatcgctttgggaagccaaggcaggaggatcacttgaagccaggagtttgaaaccagccatggcaatttagtgaaaccctgtctctacaaaaaatttaaaaaatggttggacatggtggtgtgcgcctataggcccaactgcttgggaggatgattgcagcccgggagttcaagaatgcagttagctgtgattatgccactgcactccaacctcggtgacagagcaagaccctgtctctaaaacaaaaaaaaacaaaaactttatgttaggggagataaaaaaagaaaacaaatgaaagagatttttgccaagctactactaaacttcttaaaaatagcatcttttttgttcttgatgaatgatgattatcattgattctacgtgaataaaaggtagcctatttgatatgagtatagtatattagcaaattctactcccattatgaaatggaaattattgagatctaatacaatgataaagtatttcataaaacaatgactattctatttctaatctctctcaagataaaagataatattgtctatgtatatagtggacacagagactgttcactctaagataaagttaattgccatgagtttgtacatgtgatcatcaaaaagaacagtatcctaaatttcccagaaagttgtgaaacatgtaggtatagattttaaataactagactacatatccaaatattacagtggatgtatacccctttttatgccgaatgaactgatcgcagtttaaatttttgcagctaggaatgctttgtaggtctgccttacttatatacttagtgcacaatctaacgggattccaacaagtatcacattactggtatttcacaggaaaggggaagtgggactcccgtgtggtaaatatcgttagcttagaattcatagatgacagtttgtccagaaacaaagttaaaaatctaaaacttgctagcaaaatttttactactaaaagttttattctaatgaagtatgaacttggtattacctaaaacttaataacatcttttgagatgcacagtgtcatgctaacctagaacggtatctgagtcctagcccagccatttagattatgtggagtttctagggcccagtaaaaatggacatgaataaagaggtacattttaatgaaattgtgactttgttttgaatttataaatgttgtatagaataatgatgagttttactaacttcttgtagagagaattaaagacaggtaaatttaagatttcttggcttggtattacttcctgttagaggaggagggagttgtagttagaaaagtatacaatgtattgctaatttttggaaaataaaaaatgtatttttataacaccagctattactgaaataaaactcaatgaaatattcctgactggtaaagatactgtgattttttttttttctggggaaggggcaagttgcccctgccctcccatcttctacaaagagggactcagaatctctggggtgatttgaaaactttatgtttatcaaaatgatgatggatggtggaaggacggggagaagtattcaaagaatgggaattaaaatattaataacactggtgtaatggccagagtcctgagcactgtcttactagcctgttgatttctttttttaaaattcgtttttctcattttaatgttttaaaacattttctaattgacacataataattgtgcatatttatggggcacatagagatgttgtgatacatataatgtgtagtgatcagatcaggattattagcatatccatcatctcaaacatttatcatttcttggtaatatacaatatcttctatttaaaattgtataatatattattgttaactatagccattctactatagttagaatttattcctcctatctagctgtaattttgcgtgtgtgtgtttttaaacaaatctctccttatcttcctattctccctagcctttcccagactttaatattctctattctactttttacttctatgagaccaactctttcttagcctccacatgtgagtgagaacatgcagtgtttcactttctgtttgggcttattccacttaacataatgcctgcagttgcatccatgattctgtgaatgataggatttccttctgttttatggatgaatagtgttcccttgtgtatgtgtaccacattttctttatccatttatccacgaatggacatataggctgattccatatcttggctattatgaatagtgctgcaacaaacatggcagcgggggtggtggtacagatgtccctttgatatactgatatctttcctttggataaagtaccagtaataggactgtcaaatcataaggtagttctatttgtagtattttgaggaacctccgtattttctccatagtggctatactgtcacattcccaccaacagtatataaacagtattttgtccacattcccaccagcattttttttgctctttttgataatagccatcctaatgggatgaaatgatgatatttcattgtggttttgatttgcatttccctgatgattagtgattaaatatgtttgttggccatttctatgtcttcttttgagaaatgtctgttcagattatttgctcattttctttttttattattattatttttggaggatggagtcttgctctgtcgcccaggctggagtgcaatggtttggcttactgcagcctccgcctcccaggttcaagcgattctcttgcctcagcctcccgagtagctaggattacagatgcacgccatgacgtccagctaatttttgtatttttagtagagatggggtttcaccatgttgaccatgctagtctcgaactcctgaccttgttgatccacccgcctcagcctcccagagtgctgggattacagacgtgagccactgcacctggcctctttgcccattttctaattggattatatgtggggttttgttgttgttgttgttgttgttgttgttgttgttgttttgctgttgtgacgttagagttccttgtatattctagatattaatcccttgccaattaatagtttgccagtattttctcccatcctgtaggttgttcactctgatgattgtttcctttgctgtgcagaaggtatttaatttgatataatcccatttatttacttttgtttctgttgcctgtgattttgaggtcttatgcataaaatattttccagaccaatgtcctgaagtgttttcttctggtagttttattgttttaggtcttacatttaggtctttgatctattttgagttgattgtcatataaagtgagagttggaggtctagtttcgtacttcagcattaatttggattaatttgggagttctctattcagttttattggtccatctttctgtttgtatgccagtaccataccgtttagcttactacagctttgtattacattttgaagtctagtagtctaatgcctgcagctttattctttttactcgatgtcattttggctatatttggggtctttgtgcttctatacgacttttaggatttttttttctatttctgtgaagaatgtcattggcattttcataaagagtgcactgactataaattgctttgggtactattgtcagttttacaatattaagtcttctgatccatgagcataggatgtttttttctttgtatgtatcctcttcagtttctttcatttgtgttttgtagttttccttgtagaggattttcaactccttggttaaatttatttcttggtatttttgtagctagtattgtaaatttgcattgtaaatattataaatagtagctacaaaaaatggattgccttcttgatttctttttcagctatttcattgtgtatagaaatgctactgatttttgtatgttgagggtgtatcctgcaactttactgaattcattgatcagttctaaatgttttttggtagagtctttaggtttatctgtatataggatcatgtcatctgcaaacagggacaatttggctttctcctttccaatttatatgccctttatttctctctcttgtctaattgctctggatacgacttcagtgctatgttgaataagagtgagagtggaaacccttgtcttgttccagtttataaaggaaaagctttgagattttcttcactcagtataatgttagctgtgagtttgacatatatggcctttattgtgttaaggtagtttccttctataccagatttattgagaatttttatcatgaagggatgctgaatttttttatccttcattctattgatgtgacatatctcatttgttgatttacatatgttgaactatccttgcatacctgtgataaatcccacttgattatggtgtattatctttttcatgtgctatttgattcagtttgctagcatttgttggtttttgcatctgtgtccatgagggatattggcctgtagctttgattttttgttgtcctgattttgatatcggggttatactgaccttataaaatgagttgggaaaaatttccttcacatcatttttttaatagcttgagaagacttggtattcattcttccttaaagatttggtagaattaagcagtgaagccatctgctcctggacttttctttgttgggacttcagtactattttgaataacagtggtgaaagtgaacatccttgtcatggctcagatcttagaggaaagtcttttgatttttccccattccagatgatactagctgtgggtctgtcatatatggcttttattatgttgaggtatgttctccttggtaaggctttttaggtattcaaagggacttggagcacaagcccagtaatgctgtggtttttgcagatgcttaaaaagaggtgccacctggctgggcatggtggcttacacctgtaatcccagcactgtgggaggccaagacaggaggatcacctgaggtcaggagttcgagaccagcctgaccaacatggagaaaccccgtctctactaaaaatacaaaattagccgggcatggtgacacatgcctgtaatcccagctactcgggaggctgagacgggaattgcttgaacccaggaggtggaggttgcggtgagccgagatcgagccattgcactctggcctgggcaacaagagcgaaacttagtctcaaaaaaaaaaaaaaaaaaaaatgagagagaggtaccaccttgatggtcttggataagatcccaaagaattttctgtttatcagacagagcggctcctgttcttttcccttactttcttccaaacaaatggagtctctctctctacgtgctgagccacctggaactgggagtgtggtgattcaaggccctcttggtcaccaccactggaactgctctgggtcagacttgaagccagcacagcattgtgccttgcccaaggcccttcttttcagggcagagagtttccctgcacatgtccagagatgctgtctgggagccaggaattggagtaaaaaaccttagcagtttacctgctattctattctactgtggctaagctggcactcaagtcatgatacaaagtccttccctctctttgcctgtctccaagtttagaaattctttcttctccttggtctagactgtgaagctgtcaattgtatttttcatttcactcattgacttctttagctgtagtctgttctttttatgctctctgtctcttaattgcatttctcattcaaattgggaattgttttcttgattttcttgaattgtctagctgtattctcttgtatctcactgagttttcttaggaatattgctgtgaattatttttctggcatttcatatatttccttgtgattggagtctgttactggtgaattattgtattcctttagacatgttatgtttccttactttttcatgtttggtgtgtccctaggttgatttctatacatctggtttcaaaattgcctcttccaattttattaagtcggtttgacagacaatgatttacttgtatgaattagtttttcattgatagacaaagatttattcatatgaatgggtttgttatggtttggtggctttggttttatgtggatgcagcagtgaattctgtgtagcttctttagctgtaatccacgctagtcgtgtatgcaagtgtctcaatggcctagaatgagagactttatggtggcggtggtccagctttgctgagggtgggctcacaaggctgtttcttatgttaggagcatatgtgtgccacagtgggtctgccaacttggagctggtgttggggctatgggttgttactctgaccaggagcatgtgtacgcagttgctcggctgtcctgggggtgtgcttgccaggggtggcccttggggctatttctcaggcttgggacatgggtgcataactgctccaccagtctgagggcatgtgtgccaggggcagcctgtggggctgctattcaggcctggaacgcaagtgcgaggctgctctgccagacagggttgtatcttccaagagcgcctgcggagctgtttctcaggacctgttgcaggcacagggccgtcgcgcaggtcaggaacttatctgcagagcttggggtgctacagggctgcttctcaggttctgagttggctgattcgctgttctgctggcccagtagcatgttggctgttcagaggcttgagatctcccactcagggcagaacatgcagcagtttgttaggctgaagggcgggttcacaccgggtgagactgccagactgttgttctgggtagaagtgaggacagtgggaggtggttttcctactgcgcaggaccagagtcactgccactcctgggaccaggctccatgcaactaggtttgtggtgttcagccaccggtgtgggcttgctgaaatgaagatgggagctgcagtgctggataagtgcaatagttactcacccccaccacacccccacccctgccaagaagggcacactccagaggtgcctctgatctcaagatggcactgtgctacagcagcgtggggtgagtagagggtgggagagttgtattccttactcagggcagtgcagctgcatgaatttccagcaatactttaaactgggctcagggattgagaggactgttgcattctcctgtagtaaggactgccattgtttttggtggcattgggggctggtggggttcttctgcttactttttccctgcaataggacctccctcatggctctacgcagatccagtccacacagggacaatagagtgcggaggtcactggtgcctcaatgctgccctcctggacttccagtcaccacaggtctgtctgcactcccctgctgtactctagtgctctcctttcatcactccagtcaaatcatatctgtttatttgttgccttgttttttttcttttggagtcaacgagcatcaggtgtctctagtcagctatcttgctgacatcttgcctgtgtatttcaaggaagtttgaaagtgtgctttgggtgtgacttcaagatggctgactacaggtgccctacactcgcctcctccacaaataagagaccaaaatagtaaagtataaatacacattgaatagagcttctaggaaaaaacactggaatttagcacagaagtgacagggaacctctgaggcacagcaggaggaagtgaagcagccagcctggccaggattggctcagagccaggaggagcaccacactgcaaataaaaggcaagcaagagatccctaacagtccatgttcccactgcagactcctgcagtcctagccattggagtgccccttggcctttggaggccctgagagtagtataggaagctacttgtagtccacgcagtggcattgttctagagagggagtttgtactgtttctcacacccctccctgcaaacagctgcagcatagtgccattttgggagcccagccactgccagattacattctgccctggagcccagcagcctttgtatccccacatacctggagccctactggcatcctcccatgtccactcagagggcttcagtgctgtgatgctgactggacccagtggtgcagccaggttcccaaaactctagctaatgcagtcctctgcaccatatgaaacaggcagtgcagcacaccaggagtaggagagtggccctgggacaaagggagccaaagcatgcactccccagagcctgagaactgcctccctggtgttgctgccatatacagtaaccctgacccttccactggtagggttgctgacatacctgcatgtgccttcagaggccctggagattgacccaccagagctagcacccatgtgcaccaccaaggtacctgaatacaggcacatgccacctgctggtacccacacatgtcatccagggacccaaggacgtacctgccctgctcaccatcactgcttcctatgtgtaccatccagggattggcctcacttgtacaccagatgccagcacccacacacagctaccaagacccagctcacccaaactgccaatgccaatgctggcacacatgtatgtcatttggggggtcaagggtttaagttaggtggttgcccttccactgctactgccactgctcatgtcatagacattgcctagagggttgataaactgcccaccccactgccactgccacttctaaacacaccacctggaggcccaaggactggcctgtcagtacctgcccaccattggcacccacgtgcattccctgggggctcaaggactggcgaacatggcctgctactgcatggttgcctaaggaccaacccacctggtgtccccatcttaagcaaagcctcaccacagcctccgctaacaactgtggcctaaaccatggaggaacttacaggcaccactgtaaggaacagccaaaggaattggctactgcacccacgcagggagcacattactgcacctccccagaatcaaaagccaaagcactctacttaaccaacactacagaaactatttccctgtggaaggtagtctatataattaaaagaagcaacttaccaagatgcagagatatcaacataaggacatgagaaacatgaaaaagcagggaaacatggcaattccaaaggagcacattaattctctaaagtaacagatccccaaaaaaagaaaatctgtaaaatgccttaaaaagagttcaaaataatgataagatacaagaaaacacaggtaaacaataacaagaaatcaggaaaacaattcatgatctcaatgagaaatttatcaaaaagatagatggcacaacatcgtgaaaccaaagaattcagtgaatgaaatttaaaaaaatgcagtcaagagcttcagcaatacactagatcaagcagaagaaagaatatctgaacttgaagacaggttgcttgaaattatacaggcagagaaagaaaagataaaagaataaaaattaatgaagaaacccagtataccatatgagatgccataaagtaaccagataccctaattttgttaatttttagaaggggaagagatggaaaagtcatagaaaacctatttaacgaaatactagctgaaaactaatcttgcaaaatatatagtcttgcaaaagatacagacttccagatacaggaaactcaaagatcccctaatatattcaacccaaaaggtcttctccagatcacatcatagtcaaactgtcaaaagtcaaaaatgtaaagataattacaaaaaacaacaaaagtgttcagttaacatataagggaatgtttatatgggacagtatctactgttatgaaaacacatgaaagtataaaactcactggtagagcagatacacgcaaaaaagaagggagtcaaacatcatcacaacaaaaaaaaaccaccaaatcataaatgtaaacaacaaaagaggaagaccagaacaaacgatatacaaaacaatcagaaactaataaagtggcaggaggaagtcatcacctgtcagttacaaccttgaatgtaaactgtttaaattcctccaattaaaagatatagattggctgaatggacataaaaagtaggacccaactatatgctgcctacaagtaactcactttgcctgtagacacgtagattgaaagtaaagggatgggctgggggcggtggctcacgcctgtaatcccaacactttgggaggccgaggcgggcagatcacctgaggtcaggagttcaaaaccagcctggtcaacatggcaaaaccccatctctattgaaaaaatacaaaaattagccaggcgtggtggcagatgcctataatcccacctactcgggaggctgaggcatgagaatcacttgaacccagtaggtggaggttgcagtgagctgagatcacaccaatgtgctccagcgtgggtgacagagtgagactatgtatcaaaaaaaaaaaaaaaaaaaaagaaagtgaagggatggaaaaagatattccacacacacagtaaccaaaagctgccagaaggaactgtatatcaaacaaagggtaaaaaaaaaaaaaagagagacaaagaaggtcattataaaatgataaagagatgagtgcaacaaaaggatataatagttgtaaatatatatgcactcaacagtggagcactgagatatatacagcaaataccattaaggctaaagagaatgatgaagtccccagctattattgtattggtgtttaacgctgtgctttcagcattcaacagatcatttaggcaaaaaatccacaaagaaacattggacttgatctgcactgtagaccaaatggacctaacagacatttacagaacatttagcccaatacctgcaaagtatatgttctttttatcagcacttggaacactctcccaggattgccacatgttaagacacacaaaaacaatctcagtaaattttttttttttttttgagacggagtcttgctctgtcgcccaggctagagtgcaatggcacaatctcggctcagtgcaacctctgcctcctgggttcaagcaattctgcctcagcctccagagtagctagggttacaggcgcgcaccaccacacctggctattttttgtatttttagtagagatggagtttcaccatgttggccaggctggtctcaaactcctgacctcgtgatccgcccgccttggcctcccaaagtgctgggattgcaggtgtgagccactacgcccagccgtaaatttttaaaaattgaaattatgccacatattatatctgaccacaatgggataaaactagaaattagtaatgagaagaactttgcaaactgtacaaatacatgcagtgtaaacattatgctcctgaataaccactgggtcagtggataaataaagaaggaaatttttaaaaactcttgagacgagtgaaaatggaaacaaaacataccaaaacctatgtgatactatagcagcagtctgagaaggaattttatagcaataacctcctacatcaaaaaagtagaaagatttcaaataaacaaccaaatgatgcacatcaaggaactagaaaaataagaacaaaccaaaccccaaattagttgaaggacagaaataattcagatcagagcagaattaaacataatagaaactaaaataaaaatacaaaatatcaatgaaataaaaagttggttttctgaaaatataaataaaattgataagctgctagctaaactaaccagggaccaaagagagaaaacccaaataaataaatccagaaacaaaagaggagacattacactgatagcacagaaataccaaggatcatttgagaccattatgaacaaaaatacgctaacaaaattggaaagcctagacaaaattggataaatttctgtacacatacaacttaccaaaattgacccaagaaaaagtagaaaacctgaacagaccaataacaagtaacaagactgaatcagtaataaaaagtctcccaaaaaagaagagcccaggactgcatggctttagtactgaattttaccaaacttataaagatgatctaatatctcacaccaatgcttttcagactatttcagaaaattgaaatggagagaattctttctaagacattctataaggtcggcaataccttgataccaaaaccagacaagaacacaagaaaacataaaaactataggccaatatttctgatgaacatagatgcaaaaaccctcaacaaaatacttgcaaaccaaatagcacatcagaagataatagaccataatcaagcaggatttatcccagggatgcaaggatggttcatcatatgtaaataaatgaacgtgatacatcacatcaacagaatgaagggcaaaagccatatgaacctctcaatagatgcagaaaaacatttgataaaattcaacatgccttcatgataaaaattctcaataaatttgttacagaaggaatatatctcaacataagaaaagctatgtatgacaaacccacagctaacaaactgaactgggaaaagttgaatgtcttttctctaataactggaacaagacaaagaagagacgacctgcagaatgggagaaaatatttgcaaactattcatctgacaagttacttatatccagaatatgcaaggaatgtaaacaacaggaaaaaaaatagttttattaaaacatgggcaaaggatttgaatagacatttctcaaagaagacatacaaatagccaaaaagtatatgaaaaaaatcttcactattactaatcatccatgaaatgcaaatcaaaaccacaatgaagtgtcttctcatcgcagttagaatggttattatcaaaaagacaataaataacaaatgctgaaaaagatgaggtgaaaagggaactgtcatacactctggggatgttaattagtacaaccattgtagaaaaatagtatagaggtttcttgataaacaaaaatagaactaccatgtgattcagcaatctcattactgggaatttatctaaaggaaagaatatcaggccgggcacggtggctcacgcctgtaatcccagcactttgggaggccgaggcgggcagatcatgagcaggagattgagaccatcctggctagcacggtgaaaccccgtctctactaaaaatacaaaaaattagccagttgtggtggcgggcacctgtagtcccagctacttgggaggctgaggcaggagaatggtgggaacctgggaggcagagcttgcagtgagccgagatcacaccactgcactccagcctgggtgacagagtgagactccgtctcaaaaaaaaagaatatcagtatatcaaagagacatctgtacattcatgtttactgcggcactattagcaatagccaagatatggaatcaacctaagtatccatcaatgaatgaatggataaagaaaatgttgtatatatacacaatggaatgccattcagctatgaaaaaaagcgtgaaatcatgtcatcgaagcatccattcattccattagatgaaactggaggtcattatattaagtcaaacaagcaggcacagaaagacagttatctcatgttctttctcatatgagagagctaaaaaaaatgatctcatggagatctaaagtagaatgatggctaccagaggctgcaaagggaagggatgggatgaaccctcagaggggttaatgggtacaaacttagttatataaaggcataagttctagtgtttgatagtacagtaaggtgactataactaccaacaatgtgtcatatatttcaagatagctacaggagaggatttgaaatattcccatcacaaagaagtgacaagtgtttgaggtgctggatatcctaaacatcttgattttatcattacacattttattcatgtatcaaaatatcatgtgtacctcataaatatatacaatgattatttattaataaaaaaataaaatagtcaagacccccccccaaaaaaaatttggacatgaattgcaataatgaaaactctgccctctacacttacataaatggcaactaatatatttgcctatttattctttcaatagatattaatgagtgcttataaagaataccagtataaataaattagttctggccctgcccttaatgagcatataatacagttgaagagattaagttcctactttagttgtgaactcctcaaggataggcactctatcctgtctctctccccaacccccatcaccattctctattacagagcctgcctggtgtcttaaaggtttttaaaatccttaacctcaacgttgaaagggaaagagggaagaatgggtagagagacatgaagcaacaagtctagctgtcattgtttctgaaaattaatcaaaatgaaaatacagttgtatcagttcatgaaattacagtgtagatcagtaggaaacaatttatagcaattcttttaccacacatttgttgcaaaaatgcaatctgtttctactacctgactcgggtgatatttcagatagctaagttataattaattaaagctgtgtggacttttagcttagaaaacggcttcctcttccttctgctcaccccgtgacccaacccatccctgtattgccaccactcgcttcaatctggcactgtagtcaagcccagagcaacttctgtgggtcaggggaggtgacaggcattctgtgcctagctgtttggctaggcattgcagcttcagaactcttctctccatttctaaatcatgtctaatgggactgttaaccagtggccaccaaagctaccatttccaatgagcaattctgcgaaattatgtcacagaaataaattagtatgaaatttatagagaattttctcttcatgacaatctaagaaatcacagtcacaccttaccatgcatagttatcatactgactttgtcctagactgacccaggtccagttccaccctctgggcttgtagagtttctctgttacgatgtgcagaatgcttagaacaggataggcccccagaagtgagtcctgttgttatctttcacaatcatatgaatagtattagatggagccagaaaacaataaaaattctacaaaaataatgaaactaatttgtgcaacgtgagaaaagaaaatggacattttgcaaatctatttggtgtcagggctctactttttaaaaggaaaatcaatcatggtctgtggtgtacatgttaagggaaggacttaaattcacagtaataggtattctggttacagcatggaagaactatatcattgttgaagtaaaactcaccgaggcttcagcatacaactaaattgtactttgcataagaacattaaaacaattcttggaacactctcctcccccatcactaaccacccaccgaaatacaagaaattatagtaagaaatatcactctcttggaataagcacaggagaagaaattgcaaacagattattagaaaatgtcattcatcattttcattttctttggaaatttagcttttctccctgaatataatgttttcttttttctcacatttttaaaatatgctcaatcagaatactttaaaaagactttttttttttttttttttttttttgagacggagtttcgctcttcttgctcaggctggagtgcaatggcatgatctcggctcactacaacctcctcctctggggttcaggcgattctcctgcctcagcctcccaagtagctgggactacaggcatgcgccaccatgcctggctaattttgtatttttagtagagacggggtttctgcatgttggccagactggcctcaaaatcccgacctcaggtgatcggccccacacccaaccaaaaaaatacttttttatatatatgtagaaacaccgttttatttgtaaaatatgtcaggtgctttttattaagaagtattttgagaatacagatacatcatcaaattgactgttatctttgtataattgtattacaagttatgttgtgaagatgaaaagctagtttcccttctagctacttttggtgaatagaaattaggagtgttacagcattttatttataataaaactatagtatacatgtttatgattatttaaagaaatttgttatgtttcacatgttcagagacttttgtctttggaattcctttgctaactctagcaataataagggcatgaacttttcagttacacagaattgggttcacatatggttctgtcacttagtagcctttgggcgaatttttcaaactcagatcctcagctttcttgtctacaaatttacaatagtaatatttaactcacaaggctgttataaggattagaggagattacctgtagtaagctctcaaaatattagttctttttccatataaaatataaaattctccttaaaaatattaagattatgtcataaaggtttctaagcattgcaagtggttcctatttatatctgctactattgctttccagatccagaaatagcttgcaaataatgggattcctgtagatggaataatgttaatttacctagctcactgctactgtattgtacagcttgggaaaatgtgctgtttttgcagtctgttcattcagatggcttatgaattaaaagcagaggcccatcatgttctaagatccagtagttcattattgcaaaataaaatatccatttattaggcaaggattgtctacagtgcaagtgtaaagagacccactcataagaataagtgttgccttcaaatttgtactgaagtatgctgaaaaacatgtatactatagctgtgataatgagcagtacagtagaaagaggtgatttatgatacctgtttctgacagctatagtgcagagattcccagggtagctgatcatggcattagcatgctgacagctcagcatttagaacattatggtaatttatcctgcctatgctgtcacctgcactgtcagagtttctttttaatgatggtataactattttgtttgtttgtactgcattcttttcatttggctaatgctttctcattagattgaacctagtaaatgagagtaattaagtgcttcctatagctcagatgcaatgattaagttgcagagctgctactgattatgttttgtcatttatctctattaatctgagaataatccagatgataaacacatgtaattttttgctaatgttcaatagatgaaatttatagtttctccatggagccaagcagtaaatgtatatttatatataaataatagattcttacatgtgaacttgctttaaataaacatgtaagttacaactaaagtttttataaagggaaagacacttttaattgtcctactaaatttattctatcctgaaatagccttctttactcttccaagccctaccccccacccaagggaaggaaggagggaaggaaggaaagaaaggagagaaaagaaggaaggaggtaagggaaggaacaaaggaaggaaggctggcttaaattattattatggagcaagttgtttttctgactttagttgtttttttttttttaattgtctgcagggacaagactaaaatttgttttgataatagtttatttgggctgagcagggtagctcatgcatgtaatccaaacactttgggaggccgagatgggaggatcactcaagcccaggagttcaagaccagtctagggacatagggggaccccatctctacaaaaaatttaaaaattaaccaggtatggtggtgcatgcctgtcgtcccagctattcaggaggctgaggcaggagaatccttttagccttagagtttgaggctacagtgaaccctgatcacaccactgcactctagcctgggcaacagagcaagaccctatctcaagaaaaaaaaaagacttcatttgaagtcctttcattcactctgtactgacagtttttcaactcttttcgtttactctgattttctaagctatagtaatttattattccagaagaaaatgtgtttcaactaaactgttaaataattcttgagattagtcagaatgtttgtcttttttttttgagacggagtttcgctcttgttgcccaggctggagtgcagtggcgcgatctcagctcactgcaacctccgccttctggtttcaagtgattcttctgcctcagcctcccgagtagctgggactacaggggcccgccatcacgcttggctaatttttgtatttttagtagagacagggtttcacctttttggccaggctggtctcgaactcctgaccttttgatccacccacctcagcctcccaaagtgctgggattacaggcttgagccaccgcgcccggctgaatgtttgtcttttaataaattaagctaacatgttaaaataatgtggagttatgttttttgaaaaataatacatttacacatattatttgcttatatctgacataatttgctgtaaggagatacacagttttcagaactctgatgtgactattatagttaatagttaattagctttttaaagtttctataaaaaatgccaaataacttgatacattttgtttgcaattagtgacaagacagtatttgccaacttcatgcatttcaagtatcattatgtaaagattgtttcctaattctttatgtgtaaagatttattcctaattctttataatttatttataaaattatagtttcaacaatctttcatatatactaagagaaaataaaagattgtttttaggaaattacatttttgcagaattttcataaatgcttgaaaagatcatagaattgctaaacccatgtgggcataggctacccggaattttcagctcatatttagatggtaggaaaattgacagaaacttagttactgtatttctttgtgcttaaatgtatgaccaggagtctggtgaatgtgatttcccaaacattggagtaggaacactagcagttcttattttgaaaaagaacattgtacttgagctttcaggttgtggctgtgcattgtaatgcatcaggagctgcttttacattttatttaagagaaaggtcttttaagtatctatacatgtactgcctttatttgcacatttggatcatttaatgaattttgttctatgaacaaatggtaccatctaagataaatacttgaaacattgatgttaaccctacctcagttaattttcatgaaatattattttttgaaaatgaatacttattgcataagtcctaaagtcctaaatggaatatgctgtttttaatggttattcatatattctttggattcctttctaaaataagccattgttaaaagatggatatacattacccagtgggctcttcttcccctttaggtgtagaaatgccttccatgaagactaactgggaattgagatgatcataaatattgggattttattaagtttgctagtagtttgttcacattgtttttccagcaattttagaagatacaatatttagcctaataaggattatcatctttcagagggatcaaatatctatcctgtacttatggctagattgaagaaatttttcattgaaataatcagattatatatgaagtgatgatttgttaatggttggcatagtcaaagaatctgtttttgaagttgtgggaaatgtctctgacaggcattatcagttaagtaagggactaaaagtagaaagccctaagttctaacccaaacatttttccctaatagttattttgtcaaataaatattgctcttgcacactgaggtattagggtgagtaatagtgagcattaggccagtgtaatactcttttgaatattaaattataaaataagcccaggtcgaggcaggtggattgctttgagctcaggagttcaagaccagcctgggcaacatggcaaaaccctatctctacaaaaaatacaaaaattgactgggcgttggtggctcacgcctgtagtcccggctacaggggaggctgaggctggagaaccatttgaccctgggaagcagaggttatagtgagctgagattgtgccactgcactccagccagggtgacggggtgagatcctgtctcaaataaaataaaaataaattaaattcccaaaacagaaaagtaagtaagtaaagagaaaagtttaaggctgggcatggtggctcacgcctgtaatcccagcactttgggaggctgagatgggtggataacttgagatgaggagttcaagaccagcctggccaacatggtgaaatctgtctctactaaaaataaaaaaaaaataataataattagccaggcatggtggttcacacctgtaatcccagctacccgggaggctgaggtaggagaatcagttgaacccaggaggtgcaggttgcagtgagctgagatcaagccactgcactccagcctgggcaacagagtgagactccatctcaaaaaaaaaaaaaaaaaagaataattttaaaaagttatgatttcttatcattgtttactgacttttttaaaaagcaaaaattggataatgctttaggatggaatattcactaatctagaaaatatttcttccgtattttaaaaggtggagacaatggttttaattaactggagcactttggtacctgaacctatgggaatattttcagtatggaatatttatttgctatttctgtattcctgcgtagtcaattcctaaatacgctttcttaagatagcagttttaaaaattataattactctccaccctgaccccttgccccacaacaaacaaaaatcactttgagttgttaatgttgaaatcacaagttacaagtcttcctttgtccttggttaaaaaataattataaaaatagagtaaagagaaaattctttttctctttactggtcagttctatagaagtaatttaaaataccgtatattgaattctttgatcatttctcctgggtggattgggaaagaagtcctagctgaggcaattgcttctgggctctctttctgtgtgcctggtaaatgaaacacaaggaacctcaccaaactacatgactaatggcaacctccagtgccgcctgcaatcaaagattaatttgctttatcaagtttaaagaatactgggtgataaatcatgtcaaaaagaaataatcagtcaaaggctgatgttcttttctacatgtgaggacaggtgctatgaggcatgcacttgtcatatacagttaattttcttttcatgcatttatgttcatcttaattactatttagttgatgcttgaatcaaataatttctctcattaagatcaaccagcatcccaactgcaaggctgcagtattatagattcaaaataacatttttttccttttaatttgtataagggtattttcacatgagtattaatcacaaatttttttattcaaacatgagaatgccaagtgggaagcgaaattattttctccatttcaagatacccaagaatatcaactggatgttcatgtttataatatatgtctgtgtgtgtgttatatctacgtattttatataaaattttcattttactcggattttctcacctttttttttcttttcttttcttttcttgaaagagagaaagctagagtctctaattctgtctcctgggttcataatgcaggactcactttaggtaagattatattataaagaggtcatctttcaggacttttagcagcaaacacatttgagcaggatcaaaaatgaatcttgtgtcttttcagacaccgtgctatcaggactctttaaaagcaagactcagattattgtcttaggagagtctcttatttctaattatagtcttatgaactggagcctctttaaatgtttttggtatatgtagatatgtattacttcctagcttaggtcttttctagctcactctgcctttggtggctaattagagatttagaaattaattttccgcttgatgtacacaattaaataaaaattcatcatagacttgaaacttggaactgtgaagctgtatcgtttgagtggttgtaggaaatcttatccctagagtaactcttcattttctttttcttcatggtttctctcagtttttgtctagatcttgacctttttcactccagtaaattgtcagtagtgcaggaagacttgtggctggcttttgtttaccttttattctgcttctgattcctgagaattattttaaaatatttataaagttctatttttgacatcagtagcatcctaaagagagaatatcttatattggctgggttttaagacttctttttaaactggataggaatttaacttgcctatacttaatatatatttttccacatgaaagtatttattgtgttctatttcatttccaaaatgagatgatgggacaagttgatgaggtctcttacaatttgaaagttttgtaactccagacatacctattttgatagtaactgagtcaccagtgctcattagcagtttgcataatagacatctattctagggaattgctgtagtatagactgcatggtggggtaaatagatttagatttgaagactgaacacttccatccagggtctaactccagcatttgtataaacttggacaatacttttgctacagggttgtcattgaaagtattgcctcattatatttcttagtggtccctgtatgaagccatataagagaaacttcttaatttagcactaggaaatgcttctgttgacttgagatgtgtgtgtgtgtgtgtgtgtgtgtgtgtgtgtgtgtgtgtgtctgtgtgtgtgtgtgtgtgtctgtgtgtgtgtgtattcccctaattgataaactataaaataatctttctcttttcactttggccatctggaaatttgccaccaatttatggttcaactgtataattgcatgtaacatttataatctgctttcatgaatttttatccttgtattcctcccactctgattcaattttatattataactggtccttgtgtctcattttattttatctctacttttttaatgtccgggatttcctatatgtcaccccaaatactgagtcactgtgtaaataagtaaatatatatctactctatatctataagtagtgtgatatatgagatatatatatatatatatatacacacacactgaatcactttgtaaataagtagaattgccctgactccatcactaagtattcaaaagtcagttatttcttttagagctttagtattctcacttgtaaaataaagaatgaactagattgcccttgagaactttttagacccaaattctaggattaaaaacaacataggacttccagtttccatttggagcctagaaagctggaaagagcatcactttcacctctgaaacaacaataaagctgggaaaactgcaagcttatgacttttcttgaatctgccagagaactgaagtggaaagacaaccaaatagccagaaatgtaagcagagatagatgcttgctaggaaaaaaggaacatgagcacttgcttacataaggttgactcatgaatgccataagaataactgggctagatagttaataagttggtagaggctgagtgtgggctggcaagagaaagtgaagccccagatggccttagatatatggagattttataccctcttgcaggctcttttatcacagtcccaccaggcagtttctcctacccttccctactgcaaaaaaaaaaaaaaaaagtcctgagaaagcatccttcatagtgcaggcttagagaacgaaagcaacagtgaaagggacacaaaactccacctgaatgcttcttcctatttccccaactggaaatattttgatttttgacaaatatgccatggttatataggatgttaaccttagggaaaactaaatggatggtatataggaattctttgtactatatttgcaacttttctgtatatctaaaattatgccaggccaggtgcaatggttcacactagtaatcccaacacttcggaaggctgaggcactcaggaggatcacttgaggccaggaattcaagactatcccggacaacataatgagtcgtcatctctgcaaaaaatggaaaaattggctgagaaatggtggcatgcacctgtagtgccagctacttgagagactgaaacaggagaatcactcgagcccaagagttcacagctacgatgagctgtgatcatgccacttgcacttcagcctgggcaacatactgagaccctgtctctttaaaacaaaaaaagaaaaaagaaaaataataaattttaaatttaaaaaaattgtaaataacaatttacaagtaaaattatttcaaatgcaaagtttaaaaaaataggcagcaactgtagccccacccgcttttcgggtagcattcctttgaagtagagatagttccctcatttggcagattagaattcttttcttattaaaataattttatatagttagaaaatcctgaaagtcttctccatccatctcttccctactctaccccattgttggcatgagcatcttttctttcagtgcttaaccttgttatggtttttatcccattatatgagacttatctacatacttatctttctttcagaatcctcagtgcttggcccatggtaggcattcagtggtatttattgtaataaacctggtcttctttaattgtcacttgtcttgatgaatggcaccattctagtataaaccagaaacctaggaatcatttttatttcatttcttccttactctctaccaagttctactatatattttttgcctcataaatatgtcaccaatctatctgtttctgtctcctctatagcccaactccaagcgaccgtctcttttacttgggatattacattatactcctaacttgaatcctgactcttttctcaccttcgcccactttcagcctactattgtgcattgtacaattgtagccagggtagtcttcaaaaatataaacctgattttgcctttctgcctgtttaaataactttctattgtttttaggataaaacccaactttacataggtatgtggcccttactggcctagcctcaattttcccctttaacttacatgtaaaccccactcgtctagccagcccactggtcttctttaagaccctcagcagcataaactctcttataactccaggactttacatacatcacttcttcagtcaggaacattctcttctgtttctcccaaccttcccctttcaccgttatttcctgcttacccctcagctctctgcttaaatttcatctcctcatggaagccctccctgatctcccaggctaggttatgttatctttttctatactttcacagcaccctctacttttccattatagcaactcgcacagtttgtaataatgtttgtgtgattattaaattaatatctgtctctttcactagaactgtaacttccatgaggatagggatcatgtttgattttgtccattccagcatctggcacagtactcaacacatattggaatatttatcaagctcacattaatcaaattcagttcaatgtttattaaaggaataaaagaataagctatactgtgctaagtgatggagctggaactacaactgagtacatatacccaacactagattagccacctcttctgttagcagagtttgggctataaagagcagatatcatgtcatactccagtttataaaacctcaccccaagtccttttgatgctcagtctttttctgtttgagaacaggtcctgccaaacttaagaatccctgagtacagggatgggagtgggctgagagatttgtacaaggcacaatggagcattttgcagtaatggaaacttttattgtggtggtagttacacatccatatgcatttgtcaaaactcataaacctctatgcttttgagaaggttgaattaaaaaattcctattttgaggtagacatctgctttgtatccaaggacctcttcatcctactcttacattactgtgaagggtagatccatgtgtcatgaagacatgaaaagctattccaagtccagaatattccacactacctgtgtcttactcccaccctttaatctaatcaagttttatgaaaattgaatgaattaatgaaaagcagaaactatctttggctgtttgatcatatcaggacagctctgaggccattctgttcccatgataggctgtacttactcatctctacctgattcttcctcacaacattcatttaagaaacatttgcagaatccctaaaaatgtttcttttttcctttccctactctttactaaaaataaatgtgtcagagaggacctttcactataacatgatttcctaaatccaggccaagataagatctctttctcagtggaaacaaagtatactcagacttacaagttcaattgagttagtatttaaagttggtttattaaggatgggaagttaaaaatgtaaagataggctgggcgcagtgcctcacacctgtaatcccagcactttgggaggccgaggtgggcggatcacaaggtcaggagatcaagaccatcctggctagcatggtgaaaccccatctctactaaaaaaaaaaaaaaaatacaaaaaattagccaggcgtggtggtgggcacctgtagcgccagcttctggggaggcggagggaggagaatggcgtgaacctgggaggtggagtttgcagtgagccgagatctcaccactacactccagcctgggatggagtgtagactgagatggagcgagactccatctcaaaaaaaaaaaaaaaaaaaaagtgaagatatatactttgatcaagcaaaaagcctaaactggagaattggttaaattaattaagaggaggctgaaatcacagtgcttatttgacgggagtgtctattctgacttttgctactgccaacattcaactaagtcactcaatttttttatgattgcatccttattcaagagttcattttaaacattatggttgatgacctaacgctgaataatacctgtagcacagaatacctggcatatccatcttgggttttatatactttcattttttggttaactctttgttttcttttatacctatttagtatgtcatataaaatgcgtaatttgcatgccttcaaagtaaaatcaagactaagaaattcaaacttattggtgaaataccagcagatacagattgcttgaaatatacaaggtcctatcattagtttcaaatctttttcatatgctgtattggaaatagaggtgttaaatttctacctgttacgggcatgagtttacttttggtttttaatgataatagagcttccatttttttgtcttctgtgctctatatttttagtagaatgtttgtggagcccctctctcaagatgataggtgattcttaaaagtaagactggtctctttttcatagaattttctgccaaaatgtagtttcaaatatttaaacagtaattgaagaaaaaaatattgttagagtacaactatacagctctagatccctaactggatgttcagtaaataaatgctcttgttagacagtgaggccttggaacccaggctattattgctgttggtgatacagtctgaaccaagtgttctgccctatcctttatagataagattttatacccatcacaaatattaattattgcaaatttgctttttcagttataattcaagtttgggatatattcaagcatggtcttctcatcttagtaaattgccagtagtaagatggctagttgtgaatgctatctgtccaaaacatgactttttttccttagaagaagaagcctgtctctgtatttgttagcattcaataaggaatgaagtatagactgtctcaaaggcctaccatgtaccagtatgctggatactttatttactttggtcattataacaactacataaagcaagtatcataccagttttagggatgaggaaatgaaacctcagaataaatgactgtcaataatagctaatgaattatagaccagtgtttcagaccttgagctcttaagtacagaggcacatgaaaattgaattataggcatttacattatttttctaggcataagtaataaagacctggtttcttaaaagattaataaacagtttgttttttatttttaaaatctattttatccattgcagtattttgtacctaaaattaatgattgtcacaaatcacctgctcttatctggtaagctagtgggataaacagctccatgatcactcactgttgtgtagcacagctagtccagatttgatacctccacaaaataatccactgtgggaaaacagagttccaaatggaagtttttgttcctaaaggatgacagaacaaaggaattttccacttaataattcttgtatgtgttgctatgaaacactattgaataacatcatggaatcagaatacttgaactggaagagatcatataatatatagtctagtagtttttctgtttgctccgtggttggggcagggaggggaggaggaggagcttggcaagttatcttctccttccgtgaaacagagcactttaaagtgcttactttctttatcacttactttctcatattggccttccaggtaagcccttatttaaagaaatggttccacatctttaaaaaaatttttttcaccatttcctgattttacagatggcagtttaaggcctagagatacgaattacctttccaaggtcattccacttgctggagtaggtctctcagtgttgtagtttattcatttcttcggtaaacatctattgaatatctgctgtatcccagtccctatgcttagagctcacagatgagtggaagagacagatggatgaacaaataattgacagcacagaatgacaatggaaatgtatgaagttccatatgaaagaggtcaagagaagcatcctaagagaaattatatttgaacgaggtcttaaagatggagatgattttgccaggttgaaaaggagaggataattattctcagctgagggaacagtagacagaaagccatgcgagtattacagagcatgacatgattagtccctgtcagagggactgggggtgtaaaatactgggaagataaaacagcaattaggggaagggttattactatagttgggaagggccagaacaggaaagatcctccacagcaagctaaggaaggaaggttttaccctgtaagaaataggctgccgtctgggcgtggtggctcatacctgtaatttcaacacttcgggaggccaaagcaggtgaatcacttgagcgcaggtgtttgagaccagcctgggcaacatgatgaaaccctgtctctaccaaaaatacaaaaaattagctaggaatggtggtgtgcactactcccagttactcaggaggccgaggtgaggtaagaggatcgcttgagcccaggaggtggaggttacagtgaaccaaaatcatgccgctgcccttacagcctgggtgacagagcaagaccctatctcaaaaaaaaagaaagaaagaaaaagaaataaggtaagaaatagggtgccattgaatatttttaactaggtaagagatgtgattgatcatttatttatttcaaaaaaagaattattctggtggcagtggcctagtcctagagggaaaaaaatacaaactgcaggttgcccttcagccatcttgcctctttcacttattgatggctgcgaatggtgcccccattgccttccccaatggcaataagtgttcattatgtcttgttttgttaaaggtgttttgtcctttatggtctctgcctgccacaacagcatagatcagatttggaggaccttttaaaactgagtgtttgactatctgtgaaatccctttttgtgttttcttcacttgaaatgacattatgacttactgtgagacaggataatttgtagtttcttttgtcatgatcttctttggatgtcatagaccatggagcgctctgcattggttcagaggaactgagaatgggaaggacacaagatttttatattactatttctcttgagtattctcgcttgtgatggattttggctccaggcataaagatatatggagaagcagcctgttgggagagaattttatatttcgcttggctattttgtgactaaatacagtgttaaattatttgtgtgatgcttgcatgatattaaattgaaagagctattgttttatcaaaaagtgctttagcatatactatgaaggctagatattaaataccagggcttctgtatataaagaaaagtcaagccagatttcttatcttaaattactttagtaagtaagcttagcagtggttcctaagaaacctaaagctctctttctcatcaaaagccccaaacagttggtctttgggggccatttttcttgacattatgctccagactcaatcagaattctgggtaagctagtatcttagcattctctgtctccaaaccttagatcacctgtgctttaaaataaaatctgtattacactttctcctaagcaagatttgtctttttttttaaatgaaatacagaagagaagcagaaacttttctttagtataaattcttagaaacaatgcatattctaaaggccataggagtagacttgcccttacttcgttccaaggttcctctgctccctggtcctccatacttttatcaacagctgttttggagatttctgaatgttttgatactagcaaaaataatgaaatatttttatcagcgcaatagagaaagattgcataacaagcgagaaccaattacacaacttcaagaaggctcaaaccaaaagttgctcataacagtaatgaaattgttaattgaaataggcccaaagtatatgtcatgtctcgtctcctggaagccgcataatgggatccatatttcattcccaaaaaatagtgtttctatgaagtcgtgtagtggattaactcttctttaaaaactaatccccccaaaagtaagggaaaacatattactttaattaataatgtgggtttttagatactcaaaggataacatcttagaggaaactccatattgtgtgtaataggccccaggaagaagaaaaaacatttgttaatcacctgtaataggcaatctcaaacattttacataaattttttctattccttgcaacaatcccataaaattctacttctaacattggtaaggaaacacagccaaggaggaatgccttcttttccttcttttttaccttaagccttgggcattggggtgaggtgaccaaataatatcctctaaggtaacaaataaggataaagacctaatttatcttctatgcgtataagagttgaaggaagacatggatgataagcagtgtgcccaaaaatctcggagcatattgaaaagtggataaggctttctttgtagaaagggcagaacaagaaaatgtaattatcaagaggaggaatgctgtttattgtgtgacttctacgtgccagtattctgctaggtgtttcacacatgtaatcattttaagcttcacaacaatcatgtagggtaaatgcacttttcttcatttcacagaggagaccttaggggtcaacatagttaagtaactttttcaaagtcatacagttggtaattgttgggacagaaattaaactcaggttctgcaggtaatatcctctaagaccaaaaaaaaacggtatgtaatgtgttgtatatttttctgggagagggtaaatatctttgatcatattcacaaagaagttcttaaccccccaaaatagaacaacttctatattatgccatcttaagataagcagtacagagcagggaacttggagctatgtgagctcagtctttatatcccccttaacttctacccaggtaatagtagcaagttaaaccagaaaatatatacatatatccttcataatcctttagggctaagaagtctactttttattttgttggagaagaggtatagtgtgctaggtgaatgtacagttgctagagttgaattgcttaaatttaaattctaactctaccacttattctcttacatcaaattgtactatcacagtttcctcatttataaaagtagaatagtaatagtactatcttatggtatatgtgagcgttaaattagtaaatatgtgtaaattacttagtgcagacagcagtttccaaaggacatttgatgatatttaaagatatttttggttgtcacaatttgggagaggggtgccactgtcatctagtgatagaatccaggtgcattttgcagtgcacaagacagccccacaacaaagaattatctgaccttcagtgtcagtagtattgaagttgagaagcccctggttagcacaatgagtggcatatacatttttataaacatttgctattattttgtgctgaagtctaaaaaaaaacatggaagaaaaagtagaattattatgtaatcatcttttcttggttgttttgtgtgtgtgtgtgtgtgtgtgtgtgtgtgtgtgtgtgtgtggttgtttgtttttttgtgtgttttttttttttttggttttgttttttgttttgagacagagtcttgctctgtcacccaggctggagtgcagtggcggtatctctgctcactgcaacctccacctcccaggttcaagcaattctcctgcctcagccttccgagtagctgggattacaggcacccgccaccaagcccagctaatttttgtatttttggtagagatggggtttcaccattttggccaggctagtcttgaactcctgacttcatgatccacccacttcagcctcccaaagtactgagattacaggcatgagccaccgcacctggccataatcatcttttctaagcagctaaagaaaggtaaaatttttaatctcaggtgggggggtcagccccccgcccggccagccgccccgtccgggacgtgaggggtgcctctgcccggccgcccttactgggaagtgaggagcccctctgcccggccaccaccccgtctgggaggtgtgcccaacagctcattgagaacgggccatgatgacaatggcggttttgtggaatagaaaggcgggaaaggtgggcaaaagattgagaaatcggatggttgccgtgtctgtgtagaaagaagtagacatgggagacttttcattttgttctgcactaagaaaaattcttctgccttgggatcctgttgatctgtgaccttacccccaaccctgtgctctctgaaacatgtgctgtgtccactcagggttaaatggattaagggcggtgcaagatgtgctttgttaaacagatgcttgaaggcagcatgctcgttaagagtcatcaccaatccctaatctcaagtaatcaggacacaaacactgcggaaggccgcaggttcctctgcctaggaaaaccagagacctttgttcacttgtttgtctgctgaccttccctccactattgtcccatgaccctgccaaatccccctctgtgagaaacacccaagaattatcaataaaaaaataaatttaaaaaaaaaatttttaatctcagatattaaatgactttaattaatagaacctcaatattatatggaaaaccccatttaaagtacgaatttttgatagtataaatgaatatgaaaccacatttgatgctatcagatacttgtaaatagtgtatagtttaatcctgtctagtattgaggtacttgtctatatatctgtattgatatatatatatatatagagagagagagagaacatttcatgatcatatatataaagtaattggttaagagtatgggctttgacattattctgacttgggtttaagtcccagccctgtcacgtacagatatgtgactcaatagacacataacttctctgggtctcaatttcttttgtggtaaattgtgatgttaatgtgattggtgtgatattaatgtgatttcttcagtggtaaaattgtgatattaatgtctacctgcttcatagacttaccatgttgattaaatgagataaagtatataaagtgcttagcatagtgcttgcccataatgagcactcagtaaacgatagctgttcatattatcgtcatcatccctgtccctgaaacttcagtacaagtgatgtggtaaaaactagaatagtcaaccaagaggctgattgctggtaaagtaaacctaaccataggttctgtagctaccacgtacaagctatctaactttacctactgtcttcacccattctataaaatcacctcaacttccctggccactgtacaaaggcccctttcctcatttgatatctaccaacatccactgttagcatccctaacctcttttggagataccatggatcttttttactgttccattttttactgagctctgagctatgctcatttttcatgtgtccactgaagtccacatagttatatatattttctccccaaaatcccatatcacacaaataaaaatatctaaacaggagaactgtttcctatcttgggttctctcaacacatgactgttaattttattcttttcacttaccgtatttcacttactgtatcagcctccttctaaattatatcataatctcccttaagtccctagattagtttgttcagaggcaaaacaaaagtgaaagattttgtgagaaatgcatagtttcattacacatctggtaaagacacgctatgattgctttcttacagtgtccagaagctaatttatggtactttctttgtttattgtacttgagcaatatagagtatactctgcagacatggtttacactttgaattagtttgcatctatctatattaatgtgttttgtaagccaggccttaatatctctttattgtgctcttttgaaaataattctcttaaatctatggaacgtgtcttacttgtgaagaaagacacatttttccacctttctaagattaaaatagtgagagaaacctcaaagaagaggaaatcctattttaaaataacagcgatctcctctgtagactcttggtttgcaggttgttagtcttcatcctctgtgtcaatttaatgtatcacgtaagtactagtgaacagatgtgggggtagggggaggcaagcagagtgttgaagcaggaaccagcagcattggcaaactggcaaatgcttctgttttgctaaacacctgcttttcttgtattcagattgtctgaaccatctgtttttatattctgtttacctactgtcagccattttggagttgttaaaatctttgaaagtagttgggaatttttcacagtaagctgggaatctataccactctttaaaaactttgtgtttttagggtattcccatttaatcctccagagaataattactttttaatttaggtgcaatgtgttaaatattatataattaaaatgtttttctcccttcccaattacttattcttagaaatcaaagtttaaattgtctaaataggtacttggccatagtgtgataacactaataacagattcgtaatgatagaatgtaaatattaatttatatgtcccctctcattaaaaaaagaaagaaaaaagcattacacaatttgatgaaaggtactaattttttataagcttacctactagatgatatgcaagtgatattctcaataaaaatatatagtatttataaatacctttttgcaccagatactatgctaggcattttgtccacattatcacaactcttctctacagccttgcaaggtagatattattgtcctcattttatagatgaagaaaatgattctttaagaagttgaggaaattgttcatgctcacatttgtgactggagatttgaactctggtttttacattgcttttcaaaaattctgtcatacccaagagatgattctgtgatccaaagtttctgcataaggagtcagaggtggtgcattttgtttagttagaagtgaacacacttcatttggtttgttaaattcctagctcttttctaattgtctgcagacgttttgttccttttgtcattgaggaacactgttggaacttggtccgctgcttttgtgttttgcaaggtttttcaaaaatgcttttactttaaaaagaaaatgaactagttgaggtctctgtaaaaaattccagcagagaatttgctttttccttaaagtttatatctgtctactggggcctctagtaacctttcaagataatagtcagaatagaatggctatgttaacatttttttgacctttgtcactacccagaaatgtgatctgtgcaaaatagaccttaaagatgctataagtggaggttcagttcaaatgatttaaaggcatggtgttaatagatataatccatatttatatttcacttttctagagcaaagctcacataaagaccaccgaaatcaatattatgaaagagtcaggcctctttggcctaggaatttaaacacttgaaaggcaagatcaggtttttggttttttagttaggatattggcaggacttgaaaatttctgaaatatttaaattcaagagtcgccttaaatatatgttaatttcagggaaaataagaagcaattccactttctctggtcaataataaaatttacagaacttctcccaagcaatggcacaaattaaaaatataaataggcttaataagttcatgaattaaagattctcaacaagttattatgaaaagatataaatatctgggctacatttctaaccctgtgaggttaatggtcattggtggaaggtagttcattgaagccttaatgagagacagttatgaactaggtgagccattgagctgatggatggcattcttatataattaacctagcagtggtaatcgcctccttcaagttcctagcctttctcgaaccaaggaaaaagagccaaaattgttgccattttgccaccttgacatttcttttcaattgccaaacctaactacctttcttcagtaatacaactaaaccagagagggctggtttttctgcattcagaactgtggatttagggtcattttggtatatatttaattgaactcttgggagcagatgaactcccccaaggaactgggtatatgagggcggagggcagtttcaattcaagaatgtgaagaatagaaatttctaactgaaaataaataattagaaagtgagaaaccagagtaagatgtccatgaaactcagaatatcgaggagaaagaacacatggtaacagaggcaataaagggccccagaagctgggcacagtagctcactcacgcctgtaatcccagcactttgggagtccgaggcaggaggatcacttgaggtcaggagttcgagaccagcctggccaacatggtgaaacttcatctctactaaaaaaaaaaaagtaaaaaattagccaggcatggtggcacatgcctgcaatcccagctactcgggaggctgaggtagagaatcgcttgaacccgggaggcggaggttgcagtgagctgagatcgctattgcactccagtctgggcgacagaacgagactctatctcaaaaaaaaaaaaaagggccccaaaaagatacaagctttacccctctgactctgaactatcatgcacaatgtagtcagacaaatcttaaacgtcactcttgtcctagggttcttcccacttagaaatctccctgttgctcatgacatcaagccagtactctggcttttaaggttctccataatctagctccatctactgtccagtttttggtttccacagctcccttctgtcatgctgactcccatttttaacttggatcatactgttctcttcctccttctgcccacactcatacaaactcatacctggatcatatttgctgttaaaacttaataatggcaatgctcgcactcatttattgtttattatacaccagtcactatgatgataaaccttctatgtgcattatatcttaataagtctcaaaataatcttatgacgaaggtgtcattaacctcatttctatagtagagtaactcaactaagagtacataggtaggaagtggcattcacaagatttgaccttaggtccttctaactctaaatccattaaatgatgaagtgtaattcctgatcttgctcctaaagcattttatgctctgtgtccttattttcttagcaaggtttgagattcttgaggaaaggggcagtgtctatacatatcttgtatctgtcatacaactaggacagtgctagattatcacctattttctcattgattgattggatattgattagagtgagatggtcagactttatggtgacagaaggagagaaattttattctgatcctagtcatatttctgaagtaggtgttgttaattagagcagcatcttattaagaaacagtgggttggaaccagccagtgtttagttttcaagaattgtacattagaaaaagatttatacagagtctgtaagaatgttatttttggctagattagtggcactcttttttttgtttcatttattatacaaatacttatcattacaaatctgtttattatatgctaaacagtgggacacactattgcctagggaaagatattcctgccatcacagactggtggagaacacaaagttaataggtaatcattgttcaatgtaatgaggcccatgactgatatgcagaatactgggaacatattggaagataactgatgaaatcttggggaagacaggggaagactgacacccagggggtgcttgggtttcttttagtgtcattcacttctgcatataacatacacagggaagtaagataggaccaagagttgcatattagtgcaaaaagagaacagaagtgttcagcttcatgttttccacttttccattcaagattgcaaacaggctgagtgcagtggctcatgcctgtaatcttcaggcggatcacctgaggtcgggagttcaagaccagcctgaccaacttggagaaaccccatctctactaaaaatacaaaattagccaggcatggtggcacatacctgtaatcccagctactcgggagggtgaggcaggagaatctcttgaaccaaggaggcggaggttgcagtgagccaagatcacgccactgcactccagcctgggcaacaagagcaaaactccatctcaaaaaaataaataaataaataaataaaaattgcaaacaagaccaagaaatctaaataacagttcactttagtttttttttttttttttttttaaccaaattaagggggttgaggacaaagtgaatattccatcttttctaagaagataattagtaaaacaaatgaatttaacctactcctcttagttggcaccaagaactacctgctatttccactgtctgataggtgccaagattattttatgtgcaagtcaaggtgtttttttctgagacggagtcttgctttgtcacccaggctggagtgcggtggcacgatctcggctcactgcaagctccgcctcccgagtccacaccattctcctgcgtcagcctcctgagtagctgagattacaggcatgcgccaccatgcccagctaattttttttgtatttttagcagagacggggtttccccatgttggccaagctggtcttgaactcctgacctcaaatgatctgcccaccttggcctcccaaaatgctgggattacaggtgtgagctactatgcccagccaagattattttatgtatattgaatgaaatagcatttaatatagtgtttactttggatttactagaacaaatgtcagtgaatacatatttttccctagcagctaagaaacagcattgtcaaacagtgaaaacaggaagttggggaaaccatttaactgtataacctcaagaaatctaaccactatttgattttgccatctaaagtattgtgttaggctgggctcagtggctcacgcctgtaatccctacactttgggaggccgaggcacgtggagcacctgaggtcaggcgttttgagactagcctggccaacataatgaaaccctgtctctactaaaaatacgaaaaattagccgggcatggtggcggggcacctgtaatcccagctactcgggaggctgagacaggagaatggcttgaacccgggaggcagaggttgcagtgagctgaaatcacgccactgcactccagcctgggcgacagagtgatactccatctagaaaaaaaaaaaaaaaaatatatatatatatatatatatatatgtacacacacacacacacacatatacacatatatgtatatatatggagttaatgatacctagctgtgcctattttgattgtacattcttagcgatgcaagagggagaatacaattagccttcccccagccaaaaagaggataatccaagtaattaaagatttaaaataaaattttatgaatgagatgtaggaggtagagaaagtagccatagagaaagtggatattttgtcagttatttttcttgatcactatttgagaataatatcatttaatatcaactacagtgtgggaaaaggcaatgatgatttcagcaaatgagcatttactattaaaaaagaagcaaaaataagttatgaaatatagcagagttctccacatacattgatgttatacaattatgatttatgatgataataattcccctaattccataatctgtgaaaatgaaataaacttatttccgtgaacccttcaaaaaagataactcccacaaattcctaatcaaactgattttaaaagaaaagagaaaaagtagatttgaatggagaaatcgagtgctacagaatataaaattttcattcatttgtatagtggattgtcatcttgaagtaaagatgaaatgaaacaaagttgtttgtgctttgaacattgaagcattgttcatcatgcataattaacaaagttgaaattttgtaagtatgaatcatgcacaaaagagccacagctatgatagctattacaggaaatggaggaaattaataataaaaggcaatacactacctcataaatacattctcatcataagattggagcatgaaagcattaagaaaatgccctgattaatttaacaacttaatcctgtaaattggagtatagttatttcagaattcatttgtacatagacaaagcagagacacaaaatagcttactttcattaagattttaaaagcaattcttatggatatgtgaagataatattctttcaaaagaaagattataagcggatgttccttaatgtttccgaaattacctagtttctatatctttctacaagtactatattatattcattaagaatcagaattggcacattctgggttacattccagtgatcttaccttctatataatttattttaagtaactgctaaaattatgatttttaaaagactatgtgatactaggaacataaattagaagaaaaaggtactttcttagttctcagtaattgagtaaagtttaatcctgattagaagatccttgagtaccattttgatgtgtgaaataatttatttagatgtttttaaaataaattttggagtatttttgtaaagtgcaaatacatgagtagttttctagaacggcttttatgtcatgtgaacatgtgtggatcactatattttttttcctattagctatttggtaaaagtccacaatttgccaagatggttaataggacacaaatatagacatttcatatgatgtaccatgtaaatgtaaacctttgtagttacatgtttttgtagcaagagaattgttttaaaaggcatgtaatttattagctatcggtagcttctttattgccttgccgcactgcagtaataaataaaagaaagtgaactgattttacaaatggcacacaaggtgcacattttgtgggaaaaaaagtctttttttaaagaattggcattaaatcctttttttgtgatgacaaagaggctaagagtgcaaactgtattttctgtttatcgaaaacagtctttttttctccggggcatttttccctatgatcatcaagggatttcaaaagcaataaagtgtggaatcattgttcgacttgaacagtattaaaacttaggttttaatttcagtgaagtaataagatttgaacctgtctcacattacagcactgtaaggcatttagcaattgtattttaaaggaggtttttaaaatgcagctcacttgtaagctaactgtctgtcagtaattaatagtttttcttcagcattggctgttgtgatcagaccaagaaatatctgggtttttagtaacacattatgataattgtgaatgtttattcctaattagtctaaatgtctaataattttcagcttgcttctctggctgtttaaaagaaaacagagggtgatgtttaaagctacagtgtgtcttataaaaaatatgaatgtacatctgcatgtatatttcagtaagttttacacccggcaagattatgtcagttgactcattcattaactaagtattttattcttcagtaccatttcctagtttttgatattacatcatttatatagggattgccaaataaggtactgtatgtaaagctaaacccacactgatgatctggactcttcagtgatgaacattgaaacttgtctttacttcttaaaaagggctttaaaatatgagcatttctactaaaacaatgtggcaacatatttgctgatgaaagattgtatttaccatattgaattgccttagaaaataattgcctctacaaaaggaaacatctgtatgatagcgcatggttaaagctgccatcaatttttaacatttgagggttgagctatgaccttttatgatgactgtgaacagtaactgcatccattagccataagttttgtttctttattttagtagatggtctagactgtaaatattagagaatctaaaataaatcaacatattatcctaaggatacaaaatgtaagagctatttgtggttgggaacctttgacagatagtttggatgaagcagatgattgcctgcctagcgtatctggtctccattgctatgcctgcaggcagtttagtgctatggttgtatattgatgtcagggttagtactgagtggctagcagtgacagatgtctataattacaggcaatgcttccagtatttctgaaaagccagcctatgttgaacaattatcttatttctgccttgccaaagagcatgttccaattgctagtattagcaatggtgaatatagtgctttatctgctgccttgggacaaatgtgagaaaagcacttggttataaaacataaatgcaaaatattttttcaacattttaaattagttaagttcagtgttttcctaatttttatctccccataatgtttcttttgaaggagtcttgaaatataaaagcacatttggcatacttattggaattttgttttcccctaggccttgcgtggctccccagcgccagtatcccttgctttactgaatagatgtgtttaagcaagttggctttgaaacaagtttctcctatgtgaattgcattttctggttgacacccattacaaaattggaaatgcatttccatggaaaatctcctatgcccagtaagtttagttggaaacttttaacaagaaaaattataacataatagaaaattttgaaatgtgctaaacaccttagtactggtggctttccatttgctgagaattgcaattctcaagttttgttgtaaccttttttttttttcttaagcctttgaccatttattgtccatttctgtctctcaattttcatggtcacttccttccttgctccctcttggcccacttttctgactcattagaaatgttttcatgcttgttggtgccagttctcacctgccctttttatctggtcatttgcattcatgagctatgggctgtcataccacactttccagcaggtgcggctgcctaacacatgatactctctaaccttcctaaagattaaggtgttgggggttaaaacattatccatgttgtaagttatgaatcctgtattttcaggtaatgtagaatgagaaatatctaggaaatatcacttgagaatgcagtttatcttcaaccttaatctaacctgcaatgggtttctgctttgcatttaaccactttgctgaattattcattacattttctcatttagtcttctcaacaatgttctgtttaatatacatgaatatcattttgcagaaatatgaaacaatttcagaattaaaagcttgtttagtggcaggcccttggtttcaaccagatcatcttactctgaacccagtttgcttttcgctgtatcacattggctatgtatgtatttaggcatgagtccaggaatgatcagtttcagagtgtgttgactgataatgccaatatcataagtttcatctccatactagctgttttacttcccaaggaaaagactcatttctttaactgaagattggatgtctagtcctggctcgccatcagtcacaaaagaactaagctagatccttgatattttatgtcctacaataggagaagcaacctagaaccaatagtctagtgtcagagatcagtaatattatatttatttctgaaaggtagcccctttctgttcccactgtgagagaatgccccttgggagcccatcacctaaaaactcttaataattttaaactaatgatagtgttctggacccccgtgtctgtgtacattaatttagtaaagaaaatttgggccgggcacagtggctcacgcctataatcccagcactttgggaggctgaggcaggtggatcacgaggtcaggagatcaagaccatcctggctaacacggtgaatcctcgtctctactaaaaaaatacaaaaacttagctgggcgtggtggcagtcgcctgtggtcccagctactcgggaggctgaggcgggagaatgatgtgaacccgggaggcagagcttgcggtgagccaggatcatgccactccagcctgggcgacagagtgagactccatctcaaaaaaaaaaaaaaaaaaaaaaaagaaaaaagaagaaaatttggacaattggatggacctattgatctgaatggggaaaactttgataacttattggacacagtgatcatctacttactcagtgagttgaaaacttaccttggagataggaagcaggaacttgtattgactcaaaaaatgaggatgaaagctttgaatctggcaatataggtgatgcagataagttcttgagataaaataacaccaaataccacagatcattctgtttttctcctgactttttttctatcacttttcttactactttatttctttgcaagactcaaagactagacccattatttaatattagaagttatgttacctttcattaagaccctctcccctctaactactactaaagctactcacatacccacttagaacatatatctgttttctagtatctagtccagataaagcacaaagaaaagagacattccaataaaaataataggtaatacttatgaaaattttactgtataccaggactgttataggtccttcacataaattaaccattttaatctcaaaaattccacagattaggtactactctcatcctttttatatttgaggaaactaaggtttaaagggtaagcaacttgctcaaaattacttagtaagtggcagaatctcactagtcttgggcttcagaatctattcctaaccacttcactagattacctcctattttgtgatattatactttgtaaccctagttaaaagatgtacttttgccaatcagaaggttactttgcctgcttaagtcattagcctcagttgccacacttctataatgaaagtgcttcatgggaaacagtactaagagattctttttggttttttttttgagatgaagtctcactcttgtcgcccaggctagaatgcaatggagcagtctcagctcactgcaacctctgcctcctgggttcaagtgattctcctgcctcagcctcccaagttgctgagattacaggcgcgtgccaccacgccctgctaattttttgtatttttagtagaagtagaagcagggtttcaccttgttggccaggctagtctggaactcaggtgatccacccatctcggcctcctaaagtgctgggattacaggcgtgagccaccgcgcccggctgagattcttaaaaatcattctgtcaaatattatttatgatttattcttttttagggctagcttttagtaactggtttctggaattatctcactgaagcaatcccattgtcattcatataaccacatccagaatttgaacaggacttcaccatgtctctgctcatgggctccagaataaaatcaaagtcccaagaatatcataagtaacaaccacaaagattgtcagccactttctccttttatttgagattggggaggccttttgctcttatttctggtgccaggtggcaggtccctaaactttgtgctttttaggttgtacgcctgaggagtgatgtacccagagttccagagaaggcttggaaaatagttaaggtgagttgggttgctggttatgatggtggaccagcaatctttatgcttgtctcactacagcctcagattctaattagtaaaacaggcatatgcatacaatgattaagtgtaggcatgcattgtcttcattccctttttatgcattatataattctacaatgttcatattttatagccaaaggtttagtagtccactaataagcagtattagctgcaaagcctatatttaatgtggttgcatagtacaaaagcatcctagatttcttgatgctaacattgctgagtaaccaattataatcagttattaatacttaagaaagttttatttggctacattgaatagcatctgttattgaacagtgtctagagcacatgtatcccttgtgtcagaatgtgtttctggctgacacctttaggaggtacgggggattaaacaaaatattttacttcccagttccccacctctgctatcaccctctcacaaacttcatccagcatcagcttctttgccctaaaatttaatcgtcatcttataaacttgctattgcaaagaattataaatattcctttaactgtctgaaatgctctttcaaaccatggtcccaaaatcctctactaaaattaagccttcttcccaagcatctggtgccatagccatagttagcttctttttgaatgggcttggggagataatatatttacccagggctttaccatggctttatccatagaagactagtttaacagaagcttggccccagacatggagtgaattggcagccaacaggagcaaagctgtgtcaggacaaatgtacactctccattttctctggttggctttcagctggttgcaccacaggagtctttctgtggactgcatatcctgtgaccagtaactggtgcactcaacccaggtccctcttggctagggaaggcctgtcgggaggcattaggttcatgctggtggagatccttagtcagtggctccctgaaggaaagtaaggcaaacagccagcttctgttgaacaggtggtagttagaccctagatctgcttgggggtgggaggaaaagaatctctccaaaattaccagccttgctggttttcacattatacctgtactctttctaataaattattgtttagaaactgactcagaaatatctctgacagcatctggagctttctgacttttccaccttccttagcagtctggatttgggcccaagttagaaatggaaaccccactggggtgcaagcaaaagaggaagcatgttcttagccatgcatcagtggaggcccctactgggagaggggattatcacaaggcagcaggcagccctgcaccccagcctgctgagttcatgctttgtgccacaggatgtggagcgaaggaaatgtgaggccaaagtggtcactccaagttttcttatacaatagcttattcaagcagactgggaatgcctcttaagagatttgttaggtacatgtgcccttagcaagatggccaccacagatggtgggttcagatattctaattgaaataaatgtttaacattcagatgtattttatacttccataaccagtttttctttatcagatgctgttccttattcaactgaatgaggcaagcaggattattcaccttttaccacttgatttccaacataaattatggttttaaaatcaaattctggcaaaagatttttctgtctaatttcaggcttatatttagtgatgttatttgaaacgatatggaaaaattagtcacccaggattaatgtggatctattcagtgtcactaagtttgtgtatttaatatacagcaatgatgtttgtaccattaattctcttgttatggtgataagttaattgtgattatcatattttatcctgcttcaaatgttaatgaaagagctaagtacctttagttccaaatggtttagatccaagtcattaaatgctctattctttcttacacctctcctcctccctcctctactaatgcctttcacattgatgaggtctttcttatagaaagcactgaattgacctcaaaggcacttgaagcctaaaacaaaaatatgaaaattgatttcttattcatagtaagtgatttcatactgtgttcctaaattctcttcctaaggaacactaatgctttcattatattggatcctttccagtgacaggttttgttttaccaatttagaaccagttaaaaaccttcattaataagtcattccaatagattgaaacaatacttgaaaattcacagtaatatttgggggatcttttgtggtatcacttttgtattacctgatatgtttttgagaataaattggttcagagaaggtttgtcatccaatggcaaaatactttgttgttgacttctactgcactgttaattttctgcattgagcctgcttaaacaatgcactaaagctctttgagaagttatagcatcttaaacacttatagaaggcctaagggtattaacttactataattttctgaagattcattatccaaaatcttaattcattataaaaactcttttgaaaacctatagaaccagtgttttctcttattttcttatttgcacagaatgagagattcgttgttctttttaatttgtttcatgtggtgcttttgagtacatttcataaaggactgttattgaatttctgtgactgtcattatatatccatacaatctttaggaactaatattctgggtttcccagttctgtaatctactccaaatttaaagattgacataattagtttcctcagagttataaccagaatgttagagacagtgctccagatacctaagactaaggattaggattggtaaaagaaattttaaaaattatttcggcacatgctttttttattctttattaaatgtacaactcaaaattatgttgctatttgtagtttatgtccgcatctgtttttcttacctagttccctttttaaaaccatatgtaacatcttttaagctacttgcaaattctacaggcaatatttgtcatttgatgagttgagaatttggagaatgtattggctcattgaagcattatgtactatccaaatgctcttttcttaaatttataagaacctttgcagtaaaataaatacggctaagaaaacaaatatattaaaacagttttttaagagcatgccttctcaaatctgtaataatgataattccttacatttctaatcactttccatatttcaggagcaagagagatgggtaactggttaaaatgggtaatttttctagtttctaagacaatacacattgagaagtagaaagaatttgattttgtatcatgaaattttgaagcagttcctttatgcctttaacaaatgcaatttctgagtgttactagaaggtgttaattgaacatatttgtaaagatttaagagttatggatacagattataagattttgtttatttgttttaaccgtctttatgctgtgtgaaaatcttcaaagcaccttctgattttttctgttatttttcatgtgaagagccttctcttcaaaaggtgttacctgaccacttcagcacctactgtgcagaagggtcaatgaaaggttgtacagggaaacagcatttgttgagtaactattaaatgtcaagctctgagttcgggatcatcatttaatctaatcaaaagcccataaagtaggtttttttgtttttttgttttttttgagatggagtctcgctctgtcacccaggctggagtgcaatggcacaatcttggctcactgcaacctccgccttctaggttcaaacaattctcctgtctcagcctcccaagtagctgggattacaggtacacgccacgacgctcggctaattttttgtattttagtttggggtttcaccgtgttgcccaggctggtctcgaactcctgagctcaagcaatcctcccacctcggcctcccaaagtgctgggattataggcatgagccaccgcgcccagcctaaagtaggtattattattattattactattttatgggtaagaaaccaagattcagagaccttaagaaacacctagttagtggcagatatagaattcaaatgcagtatctttgggaccaaagtctgtgctttttctacttgctaagtttatcacgacagtgttctaagacaatataccactggagatgtaaagagaaatagacatttcccctgcattccaggagtacatgctgaaaatagtggaggaaacgtattcgtgtggaaattaatactacaaaaatatcatattctattatatgttttgagaagtgcccgtaacaggctggcaaggtttcaaattaagactcttcttactgaatttatagggagagcttcttccagaaatattatttaagcattaaaaccacaccttttaaaatgacaacattttaccagtgttcatcccagatgggtaggatttggggtatattatttcacagggggaagaatacatgccttttatgcgttttcctttgttaaagaatcatatatgaaatgggattgaccaaaatgtacattttaaccatatattctttttattcatttaagaaacattattgagtagtaggcacgtgagattttaaaaaaacagagcatcatttctgctctcagggagcttacagtctattatgcaggcatattatgaaatgcagaagaaggaaagaagggaggagggctcagacaggcaaaaccttggttacagaatgtgcatctctgactatataaaactcataaccaaaggcataaccatatattcagtgtcattgtattggccatccttctctgaaggatgaccacacagataggtttagtctcttatttcttagattttgactcatttttcattgtgatgagattatcttaatacattctgaaataagagacaaggaatctgtggactgaaagtgagttttttttttttccttttcttgcattcctatgtaactcctatatacttccttaaaatagatactgcaatatggtttcttcttggtgtcataaaaattatttcggttgaaataatacaagttgtagaaagtgttaaaaactctaaatactgtgttagaagatttttctgtagaagactttcattgacctgtgcttgatgataaacgattttgtaggtatttcctaactgaacaaattacttctcactcccaaattatccatgtttaaaagggataattaaatttcaaatgtttggagacattttcatgttttctgcatgttatctgaatgataaggtaccttgaaaaatgagaaacagtcttttaaaagaaacactgtaatcatacattgattttaaatgaccctgtcacacatgaaaacaaatcagattgttgctcttaatgagcttttcaatttactattcagtagatcagataagtggatttaagaggtaatgatcctgtttagtactcaagcttgactgtcagatcctagtagtggagagaaatccccaaggacaaaagcattgacacagttctagatgggataatgggaatcaaagctaatggatgataaaaggaatggtgcaagttacaaggataattgtggattaaagcactgccatgtgtcaatgttgactgtttttctagtatattattgggtcagatctgatgctttgagaaactgttttgacagcagaacacaacagacctgcctgcctagcttcctcctcttttgaatgccagggacacggtaggaaaacttccttgtaggacccattgaattagaaagcacattttttaatgttaaaatgtttgaaatgtttaaaatcacattttaaaatgcataataaaatgattaaaacaaaaattatgtctgagttttgccataaaaaaggcatttataatgtcttgaaaatgtaaaatttgattttacgaaagtccactgtagttatttatcgaaaacaagaaaattaaccagtaaagatgtaaatacaataagaagaaaataagtaatttgagataatgccatggacacatcctttccaaaaccaggatgtcatggaatttattattaatttcatttatctatataaatgatcctgtgtaccatcaaagaatttgtgctttgagttgtggtaaagctagtttaaacatactcattcatattttcatctttgttaaacaaacgtgccttttaaattccagtcagagttaagggcacacagtctctggccctggaactgagcaagtgggtaaagcagggcacacagtagggtgtctgatccctactgttagttgattttataaaactgggcttattttaaggatctcttgacaggggtgccactaaaataaaattaaagacaattgctataatcagttactaaatattcaagctgttctctctagctacttttctttttctgttgtaatttacgattctatgtattttgtctgtagaatccaatatgtgcttaatgggaaaagtcgtttctctctctttgtgtaaaaactattcacattataatatagtcctagtagatccagaccgtgtccttccactgcacattaaagccacgtagtattcacttgacacatattgccctaggtgcaatagtagggacacaaagaataaggcatagtgtcacccctcaagaagcactcagtgtcatgagggagattcacatccaaacagttacagtgtgaaaagcgccatgacagaggaatggactggacgttgtgggaacataaaggagagttcaactcactgtgcctaggaagccttcagaggagatgacttttgaatgagtatgaggggaaaaagaggaagaagactgattgaggcaaaatgaccagcacatgaacacataaaaatctgaaattgcatgagatgtctcagtgatccatcagcattttattgtggcttgaggttgagggaaatgtggaagttgaggtaggctgaggccaagttgtgaaatgctttgtgtgccattaatcatgtcgatgctaggttttccaagggacccaatttgtatacttctatatacgagagaggtttggcatcatggtgagcttagggaaactttctgttctacatatcattcttcattagagccctctttgtgcttaaaggtttgtgattattgaggattgttggtaactgacttctttagattctctctcctccttagctccctctttcccccaaacatcttacaagcaacaatggtcactttaatcttgttagagatgaaggcctactctcatgggcaaagtcacagatatataatcactgaaatgcttttctgtagggctcagaagttagtaggtaaggcagcaggaatttgaatctcagtcttcctttctctctctctgtttctctctctctctctctctttcttccccagcttctgctctccaccgttcagcccttcctgccttctgtcaccctctacacctaacccttcctcctctccctctttttctctccctctgattcactccatcagcctgaggagaaggcttccagacacaggactcaggttgaaagcctggaacacaacctgctggttcaaatggtatttaaaatccagaaaagaaatttctacaatggcagctttcctcccctctatgaccctatacctctgggtgatttgtgttgcccctgtgataccttcatgacctatggtggtgtatcaagctcgtgttcagatataaaaaacaaaagacagagggaatagaagctatgttgctgtacataagaaataggcagattaggagaaagtgagagaacacaatcacagaggatcaaatcacagaagagaaatcccatacagctggtgactggcagggataacctggaatcacaccagagcatcagggagtatggaggtgtcaacccacctctcagctttgccaggctagtaaggggtataagtggcattttcccacttgaagtgggatatgtgtttataagcttaatgtggcttggattgagactgaaatgttgcaccccaaactctgcaaccaacactccctaattggaagcttagtggattcccaggccctgatgttttcaacagggaatccctgagcttgggatttcagtgtcaacatgaaaagtaagacgtacctgtatatttggggaagcttaattaggtaatatttgaggagaatttctataagttaacttcctttgatttttttaaatccttatttttataactgccttaaataatcctgaaatggttaatattttgctgaaatctagaataggtggaaaatttttaagtgttggaaccttttgttgaagtactctactttccagccctttgcatacctactcccgtcttccagaaaggggtggtctaccactttgagaaaaaaaaaaaatgtgtgtggtgtggtgggagtaaaatggatatatgagtgtgtttgtgtgtaagcgtttatatatttcaaaataggagcgatctggaggaaaaagttagcaaattttaaaattataagattctttttaaaaaattcctttgctctcccacccactccctacttcagtgtggataccacagtgcattaaatcttatgtttgttcaattcgaatagtcttttgaaaatatatgttaatagtaaaacttttaacaatgaaatgttttaatgcaggtatatgctcgtatgtcagaagtcttaggaataacagatgacaaccacgttctagagacgttcatgacaaaaatgtgagttcttgttttggtctttaatttttcttttgttgttgttttaaatgtaatagatctttttattgtatttaaacctttttatatattaatttttaaataaaagacttaaaattatgctttgttagaatgttagcattgttcttaattgaaacttaatttcacatattgaaaagtcaccatccaaaggacattgtaatttgtcaagtttccatacaacggcagcgtgcagcatcagatgatgattttaaaagatttacagaccttgactcttcagatcaattgggcagcatttttttttatttaaaaagaaaagcacgcgatttgaaagaccacgtgaagagattattgcaaattgaaatcattgagagaggtctgatagggcattcattagttctaagagaaacctatggctggcagagacatattcatggaaactgtccttatattggacttataacattagcagaataaactagtttctagtcataactttgtacacgtagccaaacttgtatgcctccacctggcaccccgctttatctgtgtaacagacaaacaacactgtcttgattgcagacagcaaagttagataaacagtcgtgatcataagaagtgagttttggagccacagattgatggttcattatttggcagtaacagtgagcctctatttggctttctttgtaactcctgcttctcctccctaatatgttttgggtacaaacttgatgttttccagtgaaacacttagacaactttttaatttacaaaactaaatatgtagaattatacaccatttggagagcaatattcattgcagattgcatataattttgaatatgctattgaaagaatagacaatgtttttgagcctgtttttcactttcaaaatatttgtgatttaggtcatcaaacttacataaatttatgtgtattctctggttctccttagacaagcaaatatcttacttataattaaagactttttttcatatttagtgttacaaaccttaaatactggggaagatatgagcctgtaatttcaaggactcttcagttcctaaatgacctttctgttggatatccttttcactgtatatctgacattatgtgtaaacaacctagcagatgcatttaattaaccaggtattctccttgtttataatttttgcaattttttaaaaaaataaaaagacctttcatttagccttatctgtaaatgcatgtttttgaaaggttttaattagctgtatactatgaagcatttagtcggaatcactgttgaatttatatggacatatagattcctaagtagttacagttatatttatactcacccaggctaataaatggttatataagaaagtccacatgtattttagttcatgcttttttgtaattgtcagaaattcgtgtcctaaaagaaagtatgtaacttaattttaaggaggtcaaaatgttctaaaaatattaccttataaaaactgcattcctgtgagtaaatatatctctaatattcttcagttgaaaagaacatcattttcattagttgaaaggcacaatggagtaatacaaagaaaataagttttttgaccatttctttgattattgcccccaccaaatcaacatctaatctaatctaaaataagattccccattatacattaaatgtttagatttctctgtctagcagatttttaaaattctaaaaccaagaatcttcttactaaagtctagttgacagtattgtcatatttctaacaactagagagaatcatgtagattttcttttctacattagctatcaaatatataggacttgtgaaagataagtgttggattaatcactaagattagctgatcttttaatatgaggacaaattctgaaaatggtggcattgaatggaaacctttaatgtaggttcattccaggaatatgtttatgttagttaagtttaaaattgtattccttggtaaaccataaaagatttccaaagtattagacacccacttttgtgctggaatttaatatgcaactttttattggaaaataatcgtccttgtctggcaaaatccaccatgcaatatttctgttagtaggtataatgcaataaagccagggagggctatttatcactacaaattttgaggatttcaggattctttttattattttaatatatttctttgatattaaatcagaaaaatgataaattacacctgtctaggctgtttttcctttttactggaaagtgatgtacaacccaattccaatggtcatttggctttttaagatatgtattttttcttattaaaaaaaaaactcaacccatatttttttctaataataatgctgaaatactctttatttctaacatatgaagtggtttataagtacttcctagtattgcaaactctggccttttcacaatgaattactttgaaagcatattatctgcaaagaagcctcagttattttatagcatatatctattgtttagatttaccctatttttttaggttgaaattgatatttagtataaaattaatttgatttgtattcttttagtataatttgcataatgcctaatttatttgtatctgctatttaagatctttttctatcctattaagcctattatatattctttaattcaaatattatagccttttattttacatgctgtttattgcttttgagtacttctcaaagtgaattaaaaaatcatattttcagaaaacttactagataaaagtttaaaagctataatattttaagccaggggataggaatgatttcaacatgggtacattgatttatattttttagcaattatttcaggtttgcatatttagaaatatatattagttcaatttgatttcagtgctcagttatttgaattataaatcattatgtcccttctagctgatcagtcatgaaatatctttgaattcatttacataatggaatatgtgagtggtgtatctgttttagtgcagttactggttacctaatgcatgttttgtttttccaatggatttctttattataatgtgtttttcagtcttgattttaaagcaatacattatttctatattaggaataagatgacattcttcagcaatagaaacacgcaagatcaaaaccatcacctataggcccttgttattggaaatctgtttatatattaatattcaaaatatttttatttaaaatattagaagtaaatgaaaagcatgtttctcactatgaagttttttaatgttctttatttatagtacatgtcttcagatactttctgttttattttttctattttatctgcttcagatgaaccttactcagtgtttatggtgctcaaagccagtctctgaactttggtggtcttttatctgaccacttgttagaaattgaaatcacacaagacccccatttttaggaagtattaaaaagcctttggttgccttaaagcagtagtctcagactttagtgagcatcggaatgtgagtgctttttaaaacacaaattgttaggccccactccccagagtttctctttcaggaggtgttaggcctaggcctgagaattgcagttttcacaagcctcatgttaagttggtggctccaggaccatactttgagaacttctgtctttaggtagttagaaaatagagctgcattgtatgtcctgagcagaaaagtctggtacttccctcacagacactttttcataggacttcataaaactcactagacttacagttttagagatagtctagttcctaaataatgatgtggggacgtaagtccccagattgtaactggatgactgttgcattttaccccagaattgctgtttgccaaatttgaaacttttcaaattggtaagattattgttattttaaaatccagtgacctttttgacagaaagttaatgttttcccatcagattcattacatgggtatttataataaatttagcaaatacatttgagtaactgtttaacatactctttatattttcaagaccaaattccaagaatttctgaagtagcttttttgaacaggcacagagctgaaatgactctgtacagagccagcccgctgtgttcaagttcagtacttggggatctttcccttctttgaaatgtttcctggtcagaaattttagtttctgtctaaatgggaaaaggagagattgttcaaatgattgaatcaaggaagctcctgggaaaactggagagagaataagggtcatacagagcaatcaagtaaacttacttattttaaatgctgaaaacggagaagagtatcacattttatccaaaattctgtttgttcggtaatcattatttcaagtttttattcttttgaaagataattgatcagtatttctactgcaatttattctttactcaaatttgtagcagttaacatgctccacttgggtttcagaaaggaaatttcattctctatcaggccctctgttggtggttggcctttattacataatcatcaaacatgagaaaactaaaaatatctagagtgtgtgtgtgtgtgtgtgtgtgtgtgtgtgtgtgtgtgtgtattttgaggtcctttttttaaatatactttaagttctgggatacatgtgcagaacgtggaggtttgttacataggtacacgcgtgccatggtggtttgctgcacccatcaacccatcatctacatcaggtatttctcctaatgctatccctcccctagcccttcacccccctacaggccctggtgtgtgatattcccctccctgtgtccatgtgttgtcattgttcacctcccacttatgagtgagaacatgtggtgtttggttttctgtcccgtgttagtttgctgagaatgatggtttcctgcttcatccatgtccctgcaaagaacatgaactcatccttttttatggctgcatagtattccatggtgtatatgtggcacattttctttatccagtctatcattgatgggcatttgggttggttccaagtcttcaccattgtgaatagtgctgcagtaaacatacgtgtgcatgtgtctttacagtagaatgatttatcatcctttgggtatatacccagtaatgggatttgctgggtcaaatggtatttctggttctagatccttgaggaattgccacagtggttgaactaacttatgctcccaccaacagtgtaaaagcgttcctgtttctccacatcctctccagcatctgttgtttcctgtctttttaatgatcaccgatcatcagagtgaacaggcagcctacagaatgggagaaaatttttttaatctctccatctgacaaggctaatatccagaatctacaaggaacttaaacaaatttacaagaaaaaaacaaccccatcaaaaagtgggcgaaggataggaacagacacttctcaaaagaagacatttatctagccaacaaacatatgaaaaaaagctcatcatcactggtcattagagaaatgcaaatcagaaccacaatgagataccaatatctagctttttaaaatcagactctataagagagttccacattcgtttttgagtttatccaaacttttttttttttttaccttatggatactgttaaccgcaacagttctcaagattaatgacttctccatgttattgcaaggctagctacataatttgcagggcccacctcaaaaagaagaatgtggagttacttggtcaaaaaatgttaagaatttcaagacctcaacagcaaagcattaaaccatgaagaggctcttctaggcacagggtccactatgcaagtatacagcccgcatgcctgtggagctggctctggtttggtttgatataaagaaataattccttccatttggcctcagactgactctctaagattatccccttaagttcctgtacacctgaatttggtgaatgtaagtcccatccatatgcatgataaatctatttatctactagtttatttcagtcattttcgtttctacaagccaaagaatctattttctatcaaagtcacttgatgaccatgaaaattttattttttacccctacctttcccagctccatttgtctttcttttgcttgcttgttttaagtacaataattagaacttcatccttatctagagttaacatttagtaagactaaaatagtgatttttaaatttaattccatactcatcttgaatcttattgacctctttcaattcagcaaatatttattaagcatttgctaagtacacggcaaaagaacaaataaaacacagaccctgccctcgtggattttaaattctaacagaattgacactgattgcaaacttccttttctatatttctccaaagagcttaaagtcagttgttttattaatatagtttctatttcttctgtttaaatttaactcagataaattacatacgaattttctgaaaatctacacattaaaaataatgtgggtatgtgacattgtgatatggctgatttgagggagccccttttattcgaggtcatttagacataagcttatagataaaccattaagtatgcagcttttaaacttaccaagtaatgtgcaaaccagacatcctcacatctgtttctgaccttcccaccatttgggtgtgaatcctgaatgtggtaggtgtcaggaaagagtagaggatgagagatgaagcaaagggcaagaatgaaacaagggtgatggatgaaattaaaattgtttatgtctgttacaggaactatttagcaataaacagtaatatttctgcttttgtgaaacagtattaaaatgcattgctttattttactgaataccaccatctccagatggtttgtgagaatgttaaataaaactagtttcagcttacatccctcaggcatacttctattagcattttttatcagaggaaatgttgatttatttcattgttttctgtctttatcagctacagaaaagtcatcccataatttatctcctctgtttgtttgaatactagaatcaggtgtagaatcctccctattcctcttctgtagcccccttatttagaccttcaccaagttctttagatttttgtttcacaaaattacgtaccttgagtattgttttgatctgatcatttctcttcccaaaagcccacaatctcttccacctgcttcttaggtcaagcaaaagtattgacttaaatttgagtcctttgaccgtacttgacttactgagttcccatagctaacttcctgatactccattagaccacaatttgtactttatacttgggccaaggaaatttattttacctaccccttgataaccttcattatctttcactgaatcaccacatttgccactctccctcatttgacacactgtaactcaactaggtttattcaatttttcagtcttggctaaagacttagtaaagccatcatgaaatagcttaatccttagtcctttaatactaaatgttaattcccttcattttctttcaagtcgtggtttatttttcttaatgtttgtgaacaccttgttttcaatctacatatctgggtatgaatgtaatatagtttagtatttgctggtcctgtctcctattagattgtaaattattagagattaagacttgttttcccttcctttatagtttcaaaacttcatacagtgggcatttagaacttactgttgccccttctgttgagtgattatgacttaactcctgttccttgtaaataattattagtatcccttaagatgcttcatcgttgttatacctatttggattttttatgtggtttttttttttttgttatactttaagttctgggatacatgtgcagaatatggaggtttgttacataggtatacacatgccatggtggtttgctgcacccatcaatgcatcgtctacattaggtatttctcctaatgctatccctcccctacccccccaccccccgacaggcccctgacgtgtgatgttcccctccctgtgtccatgtgttgtcattgttcacctcccacttatgagtgagaacatgtggtgtttggttttctgttcctgtgttagttcgcagagaatgatggtttccagcttcatccatgtccctgcaaagaacatgaactcatccttttttatggctgcatagtattccatggtgtatatgtgcacattttctttatccggtctatcattgatgggcatttgggttggttccaagtctttgctattgtgaatagtgctgcaataaacatacgcgtgcatgtgtcttcatagtagaatgatttatcatcctttgggtttatacccagtaatgggattgctgggtcaaatggtatttctggttctagatccttgaggaattgccacactgtcttccacaatggttgaactagtttacactcccaccaacagtgtaaaggcattcctatttctccacagccttgccagcatctgttgtttcctgactttttaatgatcaccattctaactggcatgagatggtatctcattgtggttttgatttgcatttctctaatgaccagtaatgataagctttttttcatatggttgttggccacataaatgtcttcttttgagaagtgtctgttcctatccgtcgcccactttttgatggggttgtttgtttttttcttgtaaatttgtttaagttccttgtagattctggatattagcccttcatcagatggatagattgcaaacatttttctctcattctgtaggttgcctgttcactctgatgatagtttctttggctgtgcagaagctctttcatttagttagatcccatttgtcaattttggcttttgttgccattacttttgatgttttagtcatgaagtctttgcccatgcctatgtcctgaatggtattgcctaggttttcttctagggtttttatggttttaggtcttatgtttaagtctttagtccatcttgtgaataaatattgatgttattacccaaattatcagaaatggccaggtatcatatgaggataactaattagtatagtttttggcctatatagtctcccttagtacttttataatgggtagttcttcctcctattcttttctttatatttgcttaaaaggaattttgtctgtttgtgtgtgtgtatatgtgtgtctgtgtgtgtgtctagtagggttcatgagcaaaattccacttttgagataactaaacttacatttcagttactctactttgtgcatataacctaagtacagcaatttctgacatgtaatattgtcatctgtgaactttcttctttcatcaggatctaactctgtctgcaaaaagtgtctatgaacatgtatgacttttaaatatttgcccagattcagtatgattacccactctcttgtacttagtgaatatcatgtatctagtacactaatataattctaaatgaaattttttcacgtctttacacttttgtaaataggatatatcttataattgatggtatttttaagtactttttcttagtagtacatattatagtggtttttttgttttacaatcagtggtgttttagatttgattaaatggggtaaatactcagaaaaggcctggtactgtgaattgaagtcatacttggtgttactgtgtcaagcagctactgaattgtgtagtactcctgtaacctaagaaagcagttcattctcaatttagtatcctccttttcaaaagatatagattttcagaattttcagccatctatgagattcttttcttgtttttcttcatgtgtcatcctagctatcaataagactgtcttcaccctcttcgatgttttcataaccacatggctagagacagggattttctgagaatttagtttaatgggttactgccagccagactatagagtttgctcaatcctggatgtgatgctggctcgttaatgaattggtccctcctaaaataaaatgtttccctgtcccttctgggacctgattccgatttcaattgtatttcaagaagcaaatgatctctggaggagaactagcctctttaaaatcaaatggatctgatatagcctagtgaaaagaccctatgttttagagtcagacagatctggatttgaatcgtgactcttctgttgacatgttccatgtgtgacatttcctatattaatgttactctcaagacttctagtactgttgctactgttactgttaccaccattaccagatttactgctaagaggtgttttgaatagacctctgaagtctaacctagtgttgccataatttatctagtgctccacccagccaaaatggcacaactcagaagaaccctagtctcttagagaagaataagatcagagtgtaaagatcataaagatgatgggttcatttgccttttttaacattacagacccacttaagagccagaactagctttgaattggatttctataagataacataaatattcagatgaactctcatttttttctttattgaaaaatataaaaattcttaatcatttttttctttagaatgtaattaaaaggcagtgaggctggccttggtacaaagtgcacagatgccgttctgcagaaaatgtgtctttgacagatgagattcttcctgtgaatgttctgtttattgctttcataaatattctattgtcaaaacatgacttgctgtttattaacagcactgacaggaagattcctattaatggcagcattcttattacccatagaccctgtcacttttaacttcgcaattttaagagaattctatttggtaattacttaagatatttctaagtttattgatcccaccccagtttaactgagtgaagtttgagtggcaggtcttcagcccagtgactgacactaggaataatcatcaaatctgcatctttggaggcaaggaaaaacttgctacctgacagccttgatcttgttgccctgcagcctgccagaaaaacccagtgctttgtggccaggcacggtggatcacttgaggtcaggagttcaagaccagcatgaccaacgtagtgaaaccccatccctactaaaaatacaaaaaattagccgggcgtggtggcccatgattgtagtcctggctactcgggaggctgaggcaggagaatcacttgaacctgggcgggaagaggttgcagtgagctgagatcacgccactgcactccagcctgggcgacagagcgaagagtctgtctcagaaaaaaaaaaaaagaaaaacacagtgcactgagcacctgctgagagcagtgcaatagggaaaatccatggatgtagtccctgcccttagaaagtttactgtctaatacagatacatgctgaaatgtagatgtatattttaaataagcaggtatatggctaagccaaacatacatgcttcatatgcaactggaatggttgctttggaatcagaggaacttgagtataaatcatactaattgtttatcttttgaaaaattatttaattttttttagtttatttccttacctgaaaaatataagtgatgtgctacctatctcatggaattgtgaaaattagccttgcaagttgcacacgttgtgtgaattctctgcatctttctttttccgtgattgataattggcaaagacatttgcattatctgatcctcaaaacaatcctgtaaggtagcttgggcataggtttcatcctcatttcttggagagggaaactaaggctgagacaggctaggtttattacttggattcattgactggtatagtcaagcctaggtctcctgactcatgttccaatgtgttttccactctttgatacccatgcctgagtgactaacatttagaattatgcttttcagtgcccctgtgcagaggcaatagactgaggcatgtatttggagatgatgtgaaggaaaaagaaagccagtattttccttgtaacatcaatggagccatataagattattacagccttcaagaaaggcgtgagtaggtattagggaatggccgagagatgctctagctgtggtagaaaacacatgactatggtagagtaagagaagagggtatttgcatactgactagatgtgtttagaatccacatcatacctgaaattatttagtccttgtattcatgtttccgatttcttaactttatgctccttctaagttgaactgttcagatgataatgtggtacagcagaaagaacatggcctttggaaccaaactacagttcaaatctcagcactgtcaatccatggctgtataatcttgggcaagcaacttaatttctcttagctcctgtttcattatttatggactaaaaataataaataatacttaacagtgtaattgtgaagattaggtgaattaacatatggaaatgccttttacgtactaggcacttgagaaatattagttcctttaagctgtccttctatacttgatgacatgcagtctgctatatcctcctaattatattctgatcttaggtttctaccaagagagctcactatttcttagaattgaataattttctcttttttgatagcctattatgggtcttttataaaattatttcattatgaaataacattaagtaagtagaagttcgtaagttacacccaaaatataaaaagggatcagttttaattttccactatcaagactttaatagtaaaggagttcttgtcttaattataaaattcattctttctttccataactagaatatgtataagatagaaaaagtaattgcattggttaataatagattatcattcttaacagaaggaaagacgtttctataggaatgctctttagaaattatatttttttataagtagaaattgatgccactacagttcactgttactttgtgatttattacatactgatattacaaatatatttccttagattccttaacttctattacttatatccttttaaaaaaacttgtgaagatagatgctgtgaaattcatgctaaaaaaccacacggtaagtcttatttctttaattaatgaataacattttacgaatagttgaggtaaagtgttagtaacttggattactcttttgctttcattagagtgaacacttcccttttcttggcatcagtgacaatcatagtctcagcgacttcaggtgtcgaacaaccttctacacagcgctcactcgccttctgatggtagatctgggtaaggttaagaatttaaactcaattaataagggatcagcaatacacttgtgtgaataaagaagtggagtactagtgggtacaacatttaacttattagaattagcgtcttctgacagttttctacaaccttctaagatttgagtgttcacttgttagcattagagccaaaagacaaatatttgtacttaaggtggcatttttcacttcacataacacttgcactgattttttacctcacagcttactttctgcctatcctttgacacattaattttactgctatgaatctaggaataatcttaaacagagaaaaactttacacacaaagattttcgtcatagtgatgtctaaactagagaaaaagtagaaatgatgtaactgtccaacagtagggaattgtaaaattatggcacgcctacttacttgtagaatgattggcacgcaataaaaatgaagatttaaagacaaggcaatacatgaaattttatattataacattaagtgaaaaggcaaagtgttacactggtgcaaatggtatgatcatgtatgttggggatggggggacaatacttcagaaaaggcttaagtgaaattcttcaaaaatggttagtacagccattgtgaataacagtgtagaggatcctcagaaaattcaaaataaaatgactgtacaatccagcaatcctactactgggtgtataggtatccaaaggaaatgaaatgagtatatcaaatagttgcattcccatatgtttattgcatcgttattcacaatagccaggatatacggaatcaacctaagtgtccatccacagatgaatggataaagaaaatgtggtatatatacacagtgggatactattcagccataaaaaaggaaaaatgtctgccatttgccacagtgtggatgaacctggagggtactatgttaagtgaaataagccaggcacagaggacaaatactatatgatatcactcatatgtgaaatctaaaaaagttgatctcatagaactagagagtagaatggtggttactaagagctgaggactttgaggtgatgctggtcaaaagatacaaagtttcaggtagaaagaataagagatctgttgtacgtagatggtgactatagttaataacaatatattgtattcttgaaaaatgctaagagaatggatgttaagggttctcaccacaaaaatggtaactatagaggtaatgcatttgtcaattagttagatttagttactctacatcatacatatgtacctcaaatatattgcaggtttagttccagaccatcatgataaagtgatacagtaaagcaagtcacaccgtttttgttttctagtgtatataaaagttaaacttactgtactgtagtctattaagtgtgtaatgtcatgatgtagatacaatgtacatatcttaatttaaaatactttattgcggccaggtgcggtggctcacacctgtaatcccagcactttgggaggctgaggcgggtggatcacctgaggtcaggagttcgagaccagcctgaccaacatggtgaaaccctgtctctacgaaaaatacaaaattagccaggcatggtggcaaataccttgtaatcccagctacttgggaggctaaggcaggagaattgcttgaacccaggaggtagaggttgcagtgagtcgacatcgtgccactgcactccagcctgggcaacaagaacagaactccatctcaaaaaacaataaaaataaataaaatattttattgctaaaaaattctagcaaacatctgagctttcagtgtgttgtaatctttttcctggtggaaggtctggcctcgatattgatggctgctgactgatcaaagtagttgccaaaggttgaggtggctgtggcaatttcttaaaagaagacgacaatgaaatttgctgcatcaattgacttcctttcacaaaagatttttctgtagcatacaatgctgtttgttagcatttgacccacaggagaacttctttaaaaactggagtcaatcctctcaaactctgctgccactttatcaactaaggttatgtcatattctaaatcttttgttacttcaacaatgttcacagcgtctttaccacaagtagattccatctgaagacaccacttttggtcatccagaagaagcaactcctcatccattcaagttttttcatgagactggagcaattcagtcacatcttcaggctccacttctaattataggtctcttgctatttaaatcacatctgcagttacttcctgccctgaagtcttgaacccctcagagtcgtccatgagagttggaatcaacttcttccaaattcctgttaatgttgatattatgacctccccactgaataacaaatgttcttagtggtatccagaatggtgagtcctttccagaaggttttcaatttacttttctcagattcatcagaggaatcactatctgtggcagcctagagccttacaaaatctttttttctgagcagtaggcttcaacagtgggcttaaaattttcagtaaaccatgctgtaaacagatgtgctgtcatccaggctttgttgctctatttctagagcacaggcagagtagattttagcataattcttaaggaccctaggattttcaaaatggcaaatgggcactggcatcaacttcaagtcaccatcagcattagcccctaatgagagagtcagcctggtgtttgaagctttgaagccagacattgacctctcctctgtagctatgaaagtcctagatggcatcttcttccaatgaaaggctgtttcatctacattgaaaatctgtttagtgcagccactttcatcaatggtcttagctagatcttcagtataactcactgcagcttctccatcagcacttggctgcttcaccttgcactcttaggttatggaggcatcatctttccttaaacctcatgaaccaacctctgctagcttccaacttttcttctgcaacttcctcacctctcagctttcatagaatagagttagggccttgcttcacattaggctttggcttaggaaatgttatcactggtatgattttcttttttttttttttttttttttttttttgagacggagtctcgctctgtcgcccaggctggagtgcagtggtgcgatctcggctcactgcaagctccgcctcccgggttcacgccattctcctgcctcagcctcccaagtagctgggactacaggcgcccgccactacgcccggctaattttttgtatttttagtagagacggggtttcaccgttttagccgggatggtctcgatctcctgacctcgtgatccgcccgcctcggcctcccaacactggtatgattttctatacagaccagtgaaactttctttatatcagcaatagggttgtttcactttctcattgtgtgtttttgctggcattttaatttaatcgctttaattttcttcaataatttttcctttgcattcatcacctggctaactggtgcaggagacccagcgtttgacctattaaagcttttgacatgtctttctcactaaggttaatcatttccagcttttgatttaaagtgagagacgtgtaactcttcctttcacgtgaatacttggaggccatcacagggttattaattggcctaatatcaatattgttgtgtctcagaaaatagagaggcctgagaagatggagagatacaaaggaatggccggtttgtggagcagtcagcatacataatatttatcaattaagttggctaccctgtaagggcacaatttgtggtgccccacaacagttacaataataacatcaaagggcacagattaccataacagatataataataatgaaaaaagtttgaaatattaggaaaattatcaaaatgtggcccagaaacacgaagtaggttcatgatgttggcagaatgatgccaatagaattgttcgactcaggtttgccacaaatctttaatttgtttaaaaaaaaaaaaagtgtggtatctgtgaagcacaataaaacaaggtatgcctgtctatatacttcaaaacatgttgtatacaataaataacataaaattttatctgtaaatttaaaaaataattaaaaatgctaaatgtcgactttgggttgtagcatgtaggtaattttttctatttctgatcatttgaatttttttagtgtattacttttataatggtaaaaattaacttatttttaaaatttgttactaaaaagctaaagttagtgagaagtatttacagataggcagtaccttaggatgggtacttaagcttctttgtagtgaccatgttactctagactcccatttctcatatttgaatactgcaggttagaccagttatacatgagagggttcagtcagtggcaatatcatccttagacaataccaataatacttttttctttgtttctcttgaagtctattactacatcaacttaaatatgaatttttaaaaatgtgttcatacaaacagaagaaaaataatttttttgcccataaaaggcattgaatttttaaatggaaaggggactacacccctctatgtttcttgcttttttttcatgcttttccacagactaaatcaccagaaagacaaactgccaaaaagttgagagacatgcaactagaatgattaaagagcttagtgggattgatttctaaggaaagattaaaagaaccatgtatgtataacttggctaagtgacaactagggctggaggcaaagagaactatctataaatatttgaagagcgtaaaccaggcatgcaaaacccaatcatctgctaccttaggcaagtcggagatgtaactgagtgacagcttttcgtactgcatcctggcctattttacctcttggctgctgtgttggtgagaagaggcgcagccccagactgtgtcattgcccttgacaatcatttagaaagcacagtgtgctaaactctgagggcaagacaaagatgaatcaggcatactgggtcctggcctcaaggagcttgtcttcttgctttcccagttgtccaagcattaaagagaccttgaaacatttgtctggacttaatttatttcccaggccttaaaaatgctcttttaataacacggtcacacagagtgaaagaagtggggagaccaaaaagagaagtatctggaggagagtttttaaaactaggtccgtgtcactcacattttcagaacctggaaatggaatgggttaacatttcctttttgatatggtcatcacagatagggaacccactatgtatctgtggtaggttaaacaacaggatagcactatcggagcctgcacacagccccaactctgtattctcagtactactgtacttattactgcattgataattgatattcatgatgatgcccagaaagacattgcacactttttggaaagcaaatttgctcttatttagtattgcttaatgtaaactatgaggtatgagaaactgaaataaacacatataatttgaataattggattttattagtttacccaggattctattcctttgaaatacttaacccataacagtataaagaataaattcacatttttagttcaaagtttttttttaaatgtaaatatctgttgcattacaagcactttttagacaccttgagagaaacagaaagaggctatggtggaagtgcttggtgcatggtaggtgctcaatataagtcagttgaatctggatataaataaaatttaaaatcatagtagctaccctcatagaacttccacatgtttgaaaagaaactccttccttatttatcagtaatttttactttttaaaataatgaaatgtatgtgataagcatcaagttatgattaaaagcatcaagtatgatttgttgtgtaaactaccagagctgctttctgttgttaaaaactggagttattcttcttcccaaaattatgttgggcaccttcaaggtatggactatcttttttatatttttctagcaccagtcagggtctttacattgcagatgctcagtaaatgcttgttgaatgaatgacaaacaagtatacagtaaccaagacaccgtcattgtggctcctggaatcagctctggctgccaggttctttctggaagtagctctgatcattggcctctcccaagacaaaacaaatcaagtggctgattactttcacaagtgattagctacacttggccactcttgtgcccgattagtctcttgttgctctctgttcagagtgttattactttatagacgatgatttgttgagcgttgttgaacacagtttttattatttgaagccttgtctcacaaactaggttgactggaacatggctgtcagaatttctgtatatatggcttgatagttttctattgtgtgttcattgtcatggaaacaaggaagaaaaagatagtgctgttgtcaagagcagcatagattcatatattaaatgaaaaaaataaaaacattagataatgaggatcctcctcaaattaaaaaaaaaagacaaactttttatatcactgattttggagagtgggagtggggataagaatcacagaaaaaaaaacacctactttcttgcaaaagtgttggatgtgattcttggatggaaatacaaaacattctaattgaatcctacaaaaataaattgaaaatgtcttgtgtataagccatgcacattggagtgattagaaagggggaaagaaattgggtgtcacattaattggtatttactttgaaatgcattttggtttctactcagtgatttgcactttgtatgaatttaattagatgctatgtgccccaggttgtatttcagatgaaaatggcggcggggcagggggtggttggcaataaacagttgtaccattttatcggattgctttagctaaactagacaaaatgttcacttgcataaagaacagaattgaaagcatttcatcattagaatagtggtgtttcaaaacatgtgagagatgttggcaggtttttttggtgttcgaagaaatgatcaaaatgaatgcagaaaatcccttcacgtgcagaaaaaaatggatgaccaaccagatgtgcatgtgtgttagcccttccaagaatcacttcaagttccctaggttatttaaaattaacttggtcgatctaataaactaaaggaaagatagtattacccgagccagtaaatggagaccctccagggagctattcagtataaaatacttgaataaataaaaatcttctattttgtttcatttgaatgcaggtgaatttagttgacaaatactgaagagggtaggtgtggcaaggcactataacaacgcttttcatttggtgaagaaccaaaattattatttgcaaattaagtttttaccagccacaaatttggaagtgctcagtgtcaccaatggttgatttttccttggacatttcatgattgcatcttatgttgtactacttagatgagaagcacgtggataggatttgagtgagcaatgcattcctcgggtatttaaactctaagaaacagtcatatttttaattactagggggatactaatattaaaatgatgtttatggatgtaaagagatagttctatctttaggggtgagggtagcacagtatccatatactttggcttataagaggtaattggcatctgaagatatcactagcttaaatttaagaaatcttgaatgacgaatgacttgaataacaagggaagagtattctagaaatagctactaaagatagaaataaaaacacagaggaaggaatttttttctttattaataatagttaacatttgtttaaaaatatatagtttataaaccactttcataggcatttatcctttttgatccgcctgcccacattaaataggtattattccattgtttatctgttagaaaactgaggttcagaggccgggcgcagtggctcacgcctgtaatcccaggactttgggaggccgaggcaggcggatcacgaggtaggagatcgagaccatcctggctaacatggtgaaaccctgtctctactaaaaatacaaaaaattagccaggcgtcatggcgggtctctgtagtcccagctactcgggaggctgaggcaggagaatggcgtgaaccccggaggcggagcttgcagtgagccgaggtcgcgtcactgcactccaacctgggcaacagagcgagactccgtctcaaaaaaaaaaaaagaaaagaaaactgaggttcatagagattaaatgacctgcccaaggtcagccatgtatgtagtggccctctgaccacatattttcatccacttttactaaactattacttcatctttcaccttatcaaccagtggagaaatacaacttttttccttcatttttatttgaactatttggtccaaatgattgatttggggcttgggggcagtgaaagaaaatgagaaatgattactttctaagcgtctatgaaataaacagatagatgcatgtttattgtttgttctgtataggtatattatagtttgatggtgagtgaaagtcaaatgtagtttttaaaatttgttcttatgcctaataattggccaaagcgtatttcttctcatggataaaggaacacagaggtggatatctcaggaaggtttagcaagtgaggggcttgatcagaaatagctgatagataggaagaatacatcaatgtatcaactgtgtccatgacttggcagagattatctgaaaaatagacatggggggatgggggagtgggcagtaaggggtaaagaagcagctggaaatacttaaaatctgtaatgagataattaagactaattagctggccctgtaggcagaaagcagcccattaagtccagatccagttttaataacttacctggttttgaggctagacagtccagagcaccccagggaatgagatgtttcatggatgagacttttagggtgggattctttgaaaatgggtagctatagtctgcagtgggcagtgtattttttttccgggaactaaaataaacactctggttccctagggagaagaattaaagggcacctcagttttctcttctgttaaatggagaaaactacgtagaagagttgtcatgtggtttaaataagataaagatacataaaaaggcctagagcaattcctatcacaaagcaagttcttagaaaatattaagaaacgtttattgagtgcactattagaagaagcattgactactgctgggacctcaaaatgaggcaagtttggctctcttaatgccatctactctgccttcaatatttagggctattattttcctgtggaagtaagatctgatgacacttcccaacacatactaaaatatcctgacctgcctgaagccacaggtcatttcaaaactagctagcactcctaagcaatttagagggaaactgaaatgaaaaacaaattgtggcccaagtttcaggggccagttaagcacatttctcaaagttttactgtaatataacttagaagtggtatcttaatgaagcattgggaaatagcagatgatctgggcctagacctgcagaagtcatcagctcttctgagattgcccattgttacttggttttgaatggtttattttcttcgcccagtgcctatgtctccttgtttatctctcctcttaattttccttagtttggaccagagcttcattacacctactttcttgcaaaagtgttggatgtgattcttggatggaaatataaaacattctaattgcatcctacagaaataaattgaatatgtcttgtatataagccatgcacattgcagtgattagaaagggggaaagaaattgggtgtcacattaattggtatttactttgaaatgcattttggtttctactcagtgatttgcactttgtatgaatttaattagatgccatgtgccccaggttgtatttcagatgaaaatggggggtgggggtggttggcaataaagctgacctttactgactatattggttttctgttattattgctgtaacaaattaccacaaggtagtagcttaaacgatactaatgtattattttataatcctggaggtcagatgtccaaatgggtctcagggagctaaaatcaaggtgtcagcagggctctaaggaagaatctgttcctttgccttttgcggcttctagagaccacctgctttccttggctcatggcctccctttctccagcagcgtcaggccaaatccttcccatgctgccatctttgtggttctttgacttctgcttccctcttgcacttttaaggacccttgtgattacattggacccacctggataatccagaatacttttctgttttaaagtcagttgattagcaactttaatttccctttatcacataacctaatatacttacaggttccaagaattagaacggatatctttgagagggtaattattcgtattctacctgccatattgatttatcacaattgccaaagtgtttcacacagtacttatacagtaaatcctcagtaactgttggctaccatcatttacagttatcatatcatttctattacttgcttctccttgcccacttcccccaactccccagtaatccagctgctatttgcattcaaatttaaggaaattagaagtttcactgttttgtgtacatttcggagggggagcaaacccagatttttgttgttggtattattgttttagattcacatgccataaaattcacttttgtaaagtacgtaattcattggtatttagtatattcagaatattcataaaattgtgcagccatcaccattatctaattctataacattttcatcacccccctcaaaaaccctgtaccattaagtaattgcttctcttctcccctcccccaaaccctggaaaccactaatctgttttctgtctgtatggatttgtctattctggacattaatataaatggaatcatacaatttgtggcctctgtatctggcctcttccacttagcatgttttcaaggcacattcatgttttggcatgtattaatactttgttcctttttatggctgaataatattccgtagtttggatgtgccatattttgtttagccattcattagttgatgaacatttgagttttttctacctttggttattatgaaataatacagctgtgagcatttgcatacaactttttgtgtggacaaatatttacagttttcttgggtagatacctaggagtaaaattgttgggtcaactggcaactctaattttttaagcaactgccaaactgttttccacagtgactacaccatattaacaatggttgtagcattttacatttccacccctggaggttttaaattgtacaaaataataaatgaaatgtcctacaaacaaaatatctgccagccaacatactaaaacagttactcttatattttaatgtgatgtctctgaaggaaaaaaaatgtttagaacttacaaaatgaataactttctgtttaaacatattctcagagacacagcggaggtgattagctttgggttttacctaaaagctaaggaatttataatttttatctatacatgactgagaacttacaatgttatgttcacatttacttttcctgatggcaatgaaaatattagtctataaattggcactttaccttcaaatcatattggtttctgtacctttgtcttattaagaaaaaaactaacagcttcaattattattcataaaataatcatatatacatttggaacactaaatatatgactacatacttgaatatgaagttgtaagaaagtgagctcatgttttctccttttgcaccagaaatagtaaatgatacctgtatggtaatacagattagaaaaatctctaatagtaatgttgtaaaagttgtttgcatgatataaacaacaatatccagttctccagctttggtggcacaacatttcacgttgcaatcacaggaacagtgctgactaaaaacgtaaacatttctatagtataatgcaccaatgtcttatatttgcctactttaaacccaagtgattgtctaggaattccattttcctcaccagaaccaagctggctgatcttcactctcttctgacttcatgcagctccaaatttaggattctgtgacaataacattagtccccatctctgatgccttccaccttatcagagacctggaaaagcatgagcttgggagtaaagcagacctgattgggaatcctggctcgctgacatttaccagctggaggatgttgggcaggctatctaattcctttgagtctctctgctcacatgtaaaatgaagaaaatcgtacaacttcatgagattgttctgaacagtaatgacttgcaacagtactttgaaaacagtaagagccacataagtgttttttaagcaaataaagtaccaaatccattgcctgcgtaagcactcaaggaataacagctgttatttagtcaatccacaaacatttcttgagtgtcagaccttattcaaggcactggggatactctgtgatggaaatagaacaatttccttcccagggaacttacgtcctaataggataaacaacaaatgaataaatatgtcaatgaatggccagtatagtaagtcccataagaaaagtaaagcaggttatggggttggaaagtgatgtggcgggaggggaactgtgattaccattttagatagagtggtcagggaaggcctctctgaggaagtgacagttaagtagaattgctgttcacattactgtatttatagtatttgctccttgacttctccctgcacattttggtggcttgtctcttgtgctcctgctatccttgtttgccttaaaatttgaatggagaaagagacggaatcagaaagtttttttatctgtcgctcagaatattaagttaggagttgaaatgttaaaagtctgaatttgtctttgttctgaacaagcatccttaccttggaaaactttgttcccaaaggaagggcactgggctggcaatcttgcagttatactttttttgatcaccgtaatcacctctctaagtccatgttagactcaagacaacaatagtgctaatggctgtcatttattaagtaccagacactgagcagggggatggggcgagggggtggttacagatgttttgtcatttacttaattctcatggctaactttatgaagtaaatattatgtctcttaattacaggtgagcacactaaggctttgatgactaaagtgactttatccaaaaccagacagctaacagtggcagagccaggattcaagcatagataaacttttttttcttttttttaagagacgagatctcactatgttgcccaggttggtctcaaactcctgggcccaggggatcctcctaccccagcttccaagtaggtaggattataagcattcaccactgctcccagctaagcttagataaactttgtaatttcaaagcatccattctttctagcaccattacatgcctgcagtggtagttaccactgttctcattaataattccacatttagaaaatactttatcttagaagagtaagattacatggcttaagtataatgagcatatattttatgtatttaggatttgataatgtatatttcaattatttattgtattattctatgtcaagtgttaagaaaataaagatgttctaaaattcaccttaattgagaaattactttttatctaaacacagtatttccctaataatgccaggctctattctgtgctaatactatagtgctagtatcaccactaatatttattgagcatcttctgttttccatgtattataacatttaatcttcacagtgaccctcaatgataagtatttttatacttattttatagatgaggaaactgagactcagagtaattagtaaaatatccaaaggtaaataatatacggtaaagtcagacacctggacctgtttactgccgagccctacataattctccttcactgagaaactcaaagatacacagtctcagtgccatagaagctaatccgaagatactatcagcgtaagctagtagagctagtaatttacatgtatactttataaattttatctcatttagttcccgcagtaaccctgatcagatggtagttgtggtataatgtaagtggtattattgttgctattattagatgtatgcttaaatatctgcaattcaaggcagaccggtacaatagttaagagccaggcggccgggcgctgtggctcacatctgtaatcccagcaatttgggaggccgaggcgggcggatcacgaggtcaggagatcaagaccatcctggctaacacggtgaaaccccatctctactaaaaatacaaaaaaattagccgggcgttgtggcaggcgcctgtagtcctagcaactcaggaggctgaggcaggagaatggcgtgaacctgagaggcagagcttgcagtgagccaagatcgtgccactgcactccagcctggatgacagagcaagactccgtctcaaaacaagccaggcaaaatgctatgggaatccaaagggagaagggagataacttgattgggatttaggaaagcttagcttagacattgggaaagatattatttcacctgggccttgaaaaataacatctgtataggtctatgttatcaccagttaacagagaagagtgtatctaagaggagtcacttggtcacacagccagttgacagagaagagattataatttggtctgccttactctttactcaggatactgaccttcgtttagaacggcacaccagtaaagatttgttggccctttggcatctgtttgtaacaaagctaagtccccaattctgttgtactcctgaaacaatgtgaaattgaaggaaagagataaatcacagaagattagagtcagccagatcagccactccttaagagtcaaaagatcttgatcctgccaggacctccgttactttgtctgaaaaatgactatagatgccagtgtttttcgaacattcacaggcatctgaatcatctggagggcctattaaaacaaaattgctgggacccacccccagagtttctgattcaatagatatgggatggaacctgggcatttacatctcacaagttcacaagtgatgttgatgctcccaggtcaaggaccaaactttgaggaccttctctgagctcatttcctctctaatactctattgaaaaactctactgttagaatagaaattaggaggtctgaaccatgtcgttccacctccaactaagtattccaccttaagcaagacacttaacctttctctgcctgtttcttcagtagagtgcagctcgtagctccctgtgacttaggatgaatgagtgaattc

SEQ ID NO: 14 - DNA, 167891 bp, Homo sapiens
gaattcaaacctagttacgcctgagtttatagccctgacttgcctcagtctgcaccatgtctcccctgaagaagaccttcagaaaaggttgttgattgattgttgaaaatccagattattctaagtaagagtaaccagggactctgctgccttctggggcttcagtttcctttggttgctgatgtttggcacattgcaggtgctcagtacatgttcataaaataatcatactaacgggtaagtagcaattctagaaccgctactgtgggccaggcagtgaactgggcatttatgcaagcatcttacacatttacccttaaagtaagcctaggaagtacagttgcttttaaaccacgtgggtttaaactgcttaggtccatgtatatgcagattctcttgtgcctctgccacccctgagacagcaataccaacccccacctcgcccacttcctcctccttagcctacgcaacatgaagtcgatgaagatgaagaccgttatgatgatccactttcacttaatgtacagtaaatatattttttctcctctctatgatttttggtagtattttcttttgcctagctttattataggaatacagtacataatacatataacatactaaatatacgttcagcaactgtttgtcagtaaggcttccagtcaacagtaggctatgagtagttaagtttgggggagtcaaaaattacacataggctgagcacagtggctcacacctgcaatcccagcactacggggggccagggtgggcagatcacgaggtcaggagttcgagaccagcttggccaatatggtgaaagcccgtctctactaaaaatacaaaaattagccggacatggtggtgcacgcctgtagtcccagctactcagggggctgaggcagaagaatcgcttgaacatgggaggcggaggttgcagtgagctgagattgcaccactgcactccagcctgggcaacagagcaagacttcctccccccaccaaaaaataataataataattgcacatggatttttgactgcacagaggttggttctcctaacccccacattgttcaagggtcaactatggatagtgatattccatcttgaagataagaaagttgagatttggggatgttaagtaacttatcaatgtcccatagagtatgaaatgggatgcaggtgttctgactcaagagagagaagaaacctgataaatgccgggtgtctactatgtgtcgagcactgtattctgggtcatgatgtgcattttctcactcagtcctcacaatcactttagaaaacagttttgaagccctattttacagatgagaaaacttaaggctcagcaacttgaaagtgtatttgcccatagctaaatacaacagttctctacctactagctcaggatgcttcaatccatttcaaaagttgacctcaaagtcttcaaccaaagctgaggtgctctctgcaggtggagcagacactgttatgggagggatcattctcacataaaacgcagcctctcccgtgagggggctaggcaaatgatattccttgggctctcagggaaggaatgtcactgacagggaccagacaatgatgaagtgtccagaagcaagaggaacgcagagtgttccatcagcggcgaggtgggcagagggcttgaaggcctgttctctggctgcattgctaggagccgcccctccttgttgacttcttcccctcccccggcctccctctccctgcaccactgactctgttcctacagcctccagaaggagctgccttggacaaaggccccaggccttttgcacagttcctgttgaaaagcataggagggaagggcatctgtgtctctcaattgcgtctaagatttaaagatcaagaaaggtgaattgtttggtttgtccttaaattcacgtggggggaaagcaaaagaccttgaacctggagtaactaagtcctgaagagcagggtccagactgacaattcttggatctgtttcttccacataagccaggttttgccaacacagccatgcactgttctatacaagcttctcctgaggcctcatgatgctcagcagagcactgagcgcttagtaggtggctcattgagtccaggcagctgcctgacccacagtctgagctctgcacttgagctgcaaggctgtctctgcttggtgagaagaggtcagggtctgaggcttcctgccagaaggttgcttgggtgccctgaagacaaaattgaacctgccctttatgtattttaaaaacaatttgtcaatggcaacaatttacaaaaatatattcctgttgcagtatctcccaatagctgggatttatggcttcatctcctggatctgaaagtataccggcatgctctagcaaatgggaaaatgtatgaacaatttgttggcttttttttttaatcaagttttcccaaatatgtaaactctgagagtgccttattctttttaaatgatcattcatttgtctccagactctatcttttggcacaatttattattctctatttcaaaaaacttaaatgcattttgcatattagcacgtaactcttgttcctgtctcctcagttgtggaaagggctggattgcttttataaagaaaaaaatggctaataaaatcagcctcagcaccattgctctgcaattcttatgaacagtaaagtggtacttaccgtcattgatgttaaaagctatttctaaattatggtgccatttattatctctagtgtccaaagtaagtttaaatgaagcttataattcatgttttaccaaatttccttttccccccgaggatacctctgattaacttacgcacattaaagcgctctttaaattcttcttttattgccattatgctctgaaaatctcagcgattctcaaaaatgggtaataaacttgagataaaatgctgcagttttagatcaatgctgacatatcactgtggtgatttctacagagctaaagtgataatgcttcatatttacggaatatatactaggttattactacagtattaccattttgttctaagatgaaatgagtaatttaccaatttattaaacagttacatttaagtattgcttaggacattaccaccccaatctgtttacttagcttgaagagttaccattaagataccctgtttatttaggtaaaatttgtaatcatcaagccttccattaaccaacttatttttctgcaaggctaattgtctggaaatgactttcttcttatttactgtgctatattctgcttagctggctaaaaacgccaccccagcaaacagtgctagggaaattaataatacatacagagaacagttttaattagtataataccaaatgttaataaaagatttatgacaccgttagaaagttctaatggaagagatctttacagcttcaggctcaatttgtcagcacagccacggctgcctttcatgggaggccagatttggctgattttgagaggctgctggggtgcagaggccagaccggggacctctacctttaaaagaggttcgcttggagctacatagagagttcacactagaggaggggaatttgaggcatggataggaatgctaattttaacttgaacgaagccaagttatctgcaaagaggaaggcaggccagcctgagtccctctggagacattttctggggtaccagtggttttttgtccgaactagaacaggactttgagaagctgggctgctattaattcaaaagccatgggaaaccgtatgcagcgaacccaggaaaaggacacgcgtaatatttattatctcttttgcgtcatttgcttacacacatctacagtatttaaatcttcacagcagaaaggtagcattagcctcgctttgcgggtaagcaagtaaagctctggagggtaagatcctggcctgaggttttatagctcgtgcatggagcaggatttgaacccaggtgtgagaaaacctcagtgccctgactcctgcaaggcagccccaacgtgaggagcggctgaccccattcttccgccgcgtgttttgtccacatgatgtcagccacatgagggtccagactgcagggggcgcatccaggcaagcaactgggggcttgcattttcacgtgggtgggctggcgcatttccacctcttactgtccttgcccctttatatgtccaccttccctactgtggtatgagctcacaagagcaggggctgtttcttacctcctgggggttctcagtgcctggtacatagtaggcattaaaaaaaaaaaaaaaaaagaataagtccaaggaaaaaaaggaagtgaaaaggagaatcaaatacagcttcagttttcggtgttaacgggagaaatactgaccttgcataaatatattgtgttgtgttgcagaaactcacccgcctcccggccaccaagcccatgcaacactggctcaagtataaggggttattattgttgccattttttccagcccccaagggtcaggtcttgggagcagcgggaatccttcctacggtaagctgattctttcttagctcccgtaataaaaactgaccaaaccagttactttcctaacattctctccaatttgagaagctccgtatcatgaggcacttgagggctgatggctcatttatccagccctggattaaaagagaaaaaaaacaaaaacagcgaaagttcttggacagaaattttccaggatatgtggtaaaatagcatgggctgtttctagaaaaagaagcacagtgtctgagacccggcccgccctgggagggacccgagaggctagtcagagcacattgctctgcagagctgttccctctgagaaggaatcttagtccttcagtgggtgaagggttaaacagattgtggaatttttttttttttttttttttttttgagacggagtcttgctctgtcacccaggctggagtgtagtggcacgatcttggctcactgcaagctctgcctcccgggttcacaccattctcctgcctcagcctcccaagtagctgggaccacaggggcccgccaccatgcctggctaattttttgtagttttagtagagacggggtttcaccgtgttagccaggatggtctcgatctcctgaccttgtgatccgcctgcctcagcctcccaaagtgctgggattacaggcgtgagccaccgtgcccagcccaaattgtggaatattactcagccataaagaggaaggaaatattgatacatgctgcaatgtgaatgtggatgaacctcaaaaccacgttgctatgtgaaagaagtcagactcacacttgtactcccagcactttgggaggctgaggcagggggattacttgaggtcaggagttcgagaccaacctggccaacatggtgaaaccccatctctactaaaaatacaacaaaattagctgggcgtggtgacgggtgccagtaatcccagctactcaggagtctgaggcaggagagttgcttgaacccgagaggctgaggttgcagtgagccgagaacgtgccattgcactccagcctgggcaacaagagtgaaactccgtctcaaaaaaaaaaaaaaagaaatcagatacaaaagccacagattgtatgacttcattgatatgaattgttctgtcctggaacaggtaattccatagagatagaaaggagattagtgtttaccagatgacaggggaactgggagtgattacttaatggggcgatgaaaaagttttgaaacttagataaaagtggtgattgcctaactttgcaagtgtactaaatgtcactgacttgtactccttaaaacgattatatgttatgtgaatttaatctaatttttagaagtcatttaaagaatattagcattaagtgtccagagatacattttcctgggtgttcatcacagcagtggctgtaagagggggaatttggaaataaccatacgtccatcatttaaaagttagccacataaaatcaattgtgctatggaataagaagaggtagccatcaaaaaatgtgggaagtgggggtgaattggtaggtaccaacatggaaataatatccacaatgcattataaagtgaaagaacttaatttcaaaataatatgtatatcataccaccttaaaacacatacacagggctgggcgtggtggctcacagctgtagtcaagcactttgggaggctgaggcaggtggattgcttgagccgaggagttcaagatcagcctactcaatatggcaaaaccccatctctataaaatacacaaaaactagctgggcatggtggctcatgcctgtagtcccagctacttgggaggctgaggtgggagactcacttgagcctggggaggtaaaggctgaagtcagccatgatcatgccactgcactccagcctgggtgacagagtgagcccatgtctcaaacacaacaacaacaaaaatgcatacactggccaggcatgttggctcacactggtaatcccaaaacttggggaggctgaggtgggaggatcgcttgaggccatgagttcaagaccagcctggaccacaaagtgagatctggtttctatttaggtatataaaacacacacacactcacacacgcacacacacgtgtccctcagataggcataggacaaaatctggaaggacagacagaaaactaatgatttcccaagttactgctaaggagagaaggctggagggaatgagaggggactcctactttaatgtgtcacattgtgatttgcagaaaattaaagactttttgaaaataaaaacatattttgaattaagtcaaaggatttactaatgtatcaactgcagaagcgtggtgaggaaaaaagaaaacggctcatcatctagccacccaaacacttttttagtgtgtatggctccagcattttgtgggtttgttttttttttaacacataggacacaaacttttgttttttttcagtatcactaaaaaaatcctataagatatcaaaagaggctgggcgagctggctcacacctgtaatcccagcactttgagaggccaaggcaggtggatctcctgaggtcaggagtttgagaccagcctgactagcctggccaacatggtgaaaccctgtctctattaaaaatacaaaaattagccagatgtgtggctgtgcctgtcatcccagctgcttgggaggcagaggcaggagaattgcttgaactcaggaggtggaggttgcagtgagctgcactccagcctgggcgacagagcagacaatatctcaaaaaagaagaaaaaaaaaagaatcaaaagaaacttttgactaagcagggccttccttatcctgcctgactgcattgtgcttcaaagcaccatgcatcaagaatcataggagctcatgagggcctcaaccccccaatttttaaaagatttttaaagtattgcattttcctacaattttcaggatccagaataaagacattgaacataaaatgtttatgagacaaagtggctgtgctccgtgtgtaaagtgcaagaggaagacttggctaagcagctctagaccacgactacccagggaaacatttttatcttcgttattggaaggcttcagaagggatttttactcagaatgatttggataattatctcaatctttgactttgttttgactagctctgcagactgatttgagttcaggaagggtatcagttactcaactaaatattctttcagattcatgatgccaagttgtaaaatttttatttgtttttcagtgtcttttctcaaacacagccaacattttaaagtatgctgtcttatctcttttcaaaaggtagcattttttaaatctgcaagaattgaatcaaaatgatgtgtggactttggtgtttctgtgtgtgcatatgcgcacgtgtgtacatgtaccgtggcgaccccatgtcagatattccaggcagaagagagagctaactttctcttgtatttccagtgtattcttttctatgggttgtaaataattgataaggaggtccctttccataattaaaatggatgtccctacatgtcaacaccgatagcttttccggtaatgagtgaatttagatccatgttaagtacaggctatatttactcaccctggatgggctgcaatgcagaatgtgctggctgaggactgggggtggggggacacaaggctgatttcagtggagatgacaagagaacagaaaggacataagcctgggagatcacttggagaaaagactcacctggtcccaagacctactttggactagctggtgagccaggcacaaaaaggcagtataggagaaggaggtttgaggacttggttccatttggaatctgttgagttttctttgtcttttcttccaacccctaatgtctttctagtcaacgtcttaatgacagctcctgattgcccccttccttcatggaaacctgctatctaaacctttccctacaaggagaggggcatcagttggaagcctcccagtgatcatgccactgcactccagcctgagtgacagagtgagactctgtctcacccatctctggattcaacaaacccttcctcatctccaccatgtgccctactcagtggctggtgctggagacgctgcagtgaaaaagcctatgttcatcacaacattgttcacaatagccaagatacggaagccacctaagtgtccaccggtggatgaatggatgaagaaaatgtggtacatatacacaatggaatactgtttggcctttaaaaagaaggaaatcctatcatttgcaacaacatggatgaacctggaggacatgatgctaattcaaataagcgaggcatgaaaagacaaatgctgcatgatctcacccatatatggaatctaaaaatgtccaactcaaagaagcagagaatacaatggtggttaccaagggctcaagggtggagagatagggaaagaggggatgttgggcaaagggtacaacgtttggttatgcggaggaataagattcggtgatctattgcccagcacattgttaatagatgactataggtaataataatgtactgcgtattttaaagttgctaaaggagtagattttaaatgttctcaccagaaaaaaaaatgttaagtgaggtgatagatatgttaattcgcctaatttaatcattccgtaatgtatacatgtatcaaaacttcacattgtactccataccataattatatacaattattatttgttaatttaaaagaaaagcagctgggtacagtggctcacacttgtaatcccagccacttgggaggctgaggcaggagactcgcttgaacccaggaggtggaggttgcagtaagccgagatcatgccactgtactccaccctgggcaacagagtgagactctgtctcaaaaaaaaaaaaaaaaaaagaaaaaaatctccccaccctggagggacccacagtagggggttggacagagagatgtttatcatcagggcgctatgtgcagtgattgggtgcagaggaaacaggaaccagagaagggtcatctcagctgcctggccaatggcgcaggtaacaccaagcatagggagtgggacaggcactcagggttggggctggggggatagcatccaaaagacagagatggcagagtaatttggtgggtgagggagggcttactcattgggagttgaattctatgtctgggagctgggacgtcaccttgcacatgatgctggttacacaagggttttatatgggtggggaggtgttaaattctagagaagtctttctggtggccttgagggggcagggtctagaagtgagactggaagcaggactaaagcgttcgggctgtaaaagaaagttcccaaaaacgtgagggagaagagcgcaggctccagaaaccttctccaaagtgaggcagctccatggagtgagtgggaggtgttgaggcccaagtgacagacacaagggaccttgaagagggcgatttgcaacccagacctccctgaacactcaagtcacctgagacagggaggcagagatgagaatgagacaggaaggttcatatctcggtgccaccacgtggtagctctgtgaccttgggcaagttactttccctctctgaagtatgctcttctcccctgtcatttgtgcataatgacacctgctttgcttgtgtctgtcagcacatcccaactgctcaatagatagtagggatgattatgatgtcacggtggaattggccattccacaaacacacttacagaggaactgacacggaggcctgcacttgggagctgacgacagctgtggcccgggggagcgaatcacggaagccttcctgaatgaggaaacctttgaacaagggaaagagagagctgcagactagtccagatgcatttccaagcagactgttgtcaaaggaaaaaaaaaaaaaaggtggcagcgtgtcagttctggcagaaatactggagaccacagatgcattttcccgcctgcccccgctgttctctctgtctccctccctctggcctccttcatagggtcttggctttgataacaccagctgactccagagagagggcaggcagctcagagtcggtggacatcaaggaaagagccggaggataactttagaaaatggtgcccattctcgaatagtaccaagtccttcagctcctaagaacaaactgcgccgacactgatctagacttttagcagttttttaaaagcagccttgccaacatgctaaaggtccatatttatttattttctttacagtatttttaaagtgttcaatgctcaaagaccccccaggaacttttttttttctcttgagacggagtcttactctgttgcccaggctggagtgcagtggcgcaatctcacctcgctgtaacctctgcttcccaggttcaagcaattctcctccctctgcctcccgagcagctgggattacaggagtgtgccaccatgccaagctaatttttttgtatttttagtagagacagggtttcaccatgttggccaggttggtcgcaaactcgtggtctcaaggtatccacccgcctcggcctcacagagtgctgggattataggcgtgagccaccatgcccagcccccaggaacattttttccaattaaaaaaaaaatcattagaagaagcctgatatcaggccaggcatggtggctcacacaccattgcactccagcctgggcaacaagagcgggtcctgtggaggggatggatgaaaaagtcgttattacagactgattacacatggagaagcccattggctaactcagagatgggtgctttgaggtagtaggacactaccagtgttttgtctcatcagagaaactataatagaggggaaatcctggtggctgcgcccccaaagttgtatgacctgcttgcaaaatattgtaggagaaatctggcaaggactcctggatctcccaagtcctcaagccactccatccctcctgaatgcaggctcccctggcatgggtgtctgctgtcagcccagcaggtgcacattccatgagtcctccattcttaggtggggtgcctgccacatttaccacaaaactcagctttgggagcaaaacaagctacaggacatttattcccatgatttgtgatactgcagttctgtccctgttcagtgctaaagcaggtgctgctgtctgtgtgagcttatttgtacccgttgtggctgaccctttctttttcttttttttttattttgagacagagagtcttgaactgtcgcccaggctggagtgtagtggcacgatctccactcactgcaacctcctcctcctgggttcaagcaattctcctgcttcagcctcccgagtagttgggattacaggtgcccgccaccaagcccagctaattttttctttttttagtggagacgtggtttcactatgttggccaggctggtcttgaactcctgatctcgtgatctgcccacctcggcctcccaaaatgctgtgattacaggtgtgagccaccacacctggctgtggctgaccctttcaagtgaccacagtgtggactcagggagatgagttccaagagggctggacatgggcttaagtgggatgccacggctctgacacaacaaactcctccttagggtccatccctgtgcctctcaggccctcaggtcttctttcctggtcatggagcacatgatctcttgccctacaagcagggcatactggaagggccagaaagttgctgcttacagctctcaaccaataatggtcaaggagttgatggattcatgtcccagcaacctggccctgcgttgagaggcatgttctcacatctcctagacatctccagtgagaatgagctcccgttgcccacagtgggaactcgcttgaaagcacacccttttttgtttttttgttgctgttgtggttttgtttgtttgtttgtttttgttttttgagacggagtctcactctgccgccatgttgcctaggctggtctcaaactcctgggctcaagtgatccgcccacctcagcctcccaaagtgctgggattacagatgtaagccactgtgcctggctggaaggacaccttttattgatcatcttcccttccctgcctcgcctctctactctctcgccattgactgctgggatcactgccaaataagctgcttgcacccaaatactcatcttagagtctgcttttggggaaaacccaaacaaaacaaaatggagttagctacatagaacctatgaaattgccacctattaccacagcaagttcatatggtgtaactaatcattcttggtgcataagctgtatgtatggagatgccaaagcaacatgtctgatctctgtgaactcaaacatatctgtgtttgtgagctacagactatgtgcaggaacaattctatatttgctttttcgtctgttttcctgtcctaatggcagtgtccagcttgtcatttttaatgcttactgtacttgatattcaattgttctgctctaccttctatgtagagccagtttcatgaatttgcaacctgtgcaatctacagagccccggcctcaaagagagtccagagcttgattcaatgctctcctgttgacatcttgaaattcttaagaatttctgaaggggctccacatttttttttttttttttgagatggagtctcactctatcacccaggctggagtgcagtggcatggtctcagctcactgcaacctccgcctcctgagttcaggtgattctcctgcctcagcctcccaagtagctgggactacaggtgcccgtcaccatgcccggctaatttttgtatttttagtagagacagggtttcaccatttggccaggctggtctcaaactcctgacctcaagtgatccacgcacctcggcctcccaaagtgctgggattacaggcatgagccaccacccctggcctcacattttcattttgcagtaggcctgcaagttatgtccatggtcttgcctgcataattcagatgtcctttacttttgagcatttccctcacccatctttcctctgctataaatacaacagtcaacaattgagaaaaagattatctaattgcaagattaaaaatttttgatgatatactatgttagtgagaatggaggaaacaggcactctcatacactattgtcaggagtgttaatagttcagcccttttgtagtacaatttgacaatatttttcctaactgaaaatgcccattccctttaattgaatgattccacgaacaggtttttattgaacacatatacttctatgtttgttcaaagaagtacatgaggctgggtgtggtgtctcatgcctgtaatcccagcactttgagaggctgaggcaggtggattgcttgagcctaggagttcaagaccagccatggccaacatggcaaaaccgtgtctctaaaaaaaacacaaaaaattagccgggtgtgctggtgcacaactgtggtcccagctagtcgggaggctgaggtgggaggatcacttgagcctaggaggcagaggttgcagtgggccaagaccatgccattgcactccagcctgggagacagagtgggagcctgtcccccctgcccccaccaaaaaaaaaaaagaaaaaggaaagaaagaacgaaagaacaaggcaatttgttgcagcaccattttaaaaagcagttgattgaaaatgacctaaatgaatgtcaacaggaaactgattcaatagcatatagaatacccatgtcatggaatactgtgcaaccactttaaaaaatggactaatggccaggcgcggtggctcagtcccagcactttgggaggccgaggcgggtggatcacgaggtcaggagatcgagactatcctggctaatacggtgaaatcctgtctctactaaaaatacaaaaaaaaatagccgggcatggtggcgggtgcctgtagtcccagctatgtgggaggctgaggcaggagaatggcgtgaacccgggaggtggagcttggagtgagcggagattacgccactgcactccagcctgggcgacagagcaagactccgtctcagaaaaaaaaaaaaaagactaatatgtaactatctccagatatactgcaaagtgaaagagcaaggtacagaatgggagtttagtaacttacatttgtataaaaagatgaggagagctaaaagcccttaacatacgcatggatcagctctggaagaatggatgagaagctggtattcccactgttcaggggaggggagttggggaatgggaaacaaagatacgagggcaaaagactttttttttcctatttattctccttttgggtgtctgaaatttctcttttttttttttcctgtgaacgtttaaaaaatcagttttaagcatttaatacttaaaaatgtaaagaaaaaaaagcaagcaagctaataggatgccaagcagcccttctgctctgactccgagcttctggtctggaatggccaggactaaagagctatttgaactcatttctggattgtgtcacattgtcttctctcccctggggctgtcatcataaggccccaatgctttgaaatttagagtgaaagaaaagttctttatttctcttgatgaacttgtatattttctctgttttgaaaataagaagtatgcattgggaaaagggactttggaaacaacaacgacaacaacaaaataagaacataaagtaacagtgtcttctttccctgctttggctaccaggaagctcacagaccaaactcaattatatgttagctgcctgggctatatgttaaatgcttttatttctgtagaaaaatttgattttctatgtctatttcatggtctttgaatttgcttctctattcatatttaaattatgattgattttattgcatatgggctaaaaaaaaaaatttggattttcaactgatgttttgtgctctccctacatttctttgtcccccttccccatcctgccctcattcattcaagaccaggtggcatctttgcctcagggaagggatgtcacagtagaaggatgaaaaaaatcttttgagtttcaaagcccaaaccctgagggactttgggcctaagcaacagatttgggagaggagggatggagtcagatggagaaaagcaggctaaagcttcccagaccggaggagaagggagcaaaaggaaatcgagagtgagggaacagcagaaaaccagcactgcggagagacatctgtcccagagggagcctgtgccctgcttcccactcagtgcacaaggacaacaccagacccgtggcagaacggctgcatggttagacagatgggcctgagaccacctcccagagcttcctgcaccccagagggcacagggactatgcaaaatgactcccatatgcccggggaggggggagtctggaggcgcttggagagcatatccggagggcccttctgcttgagaaaggaagctgtgtggcagcctccttcatgaacccagatcaaggccagatgatggtcttcaccccagatgccaggatacatggacagtggctgaagatgaggacaggtgtctggcttgccttgatgccttgtagccctgcagaatggagatcaatccaggaaaacccaaaggtcaactttctgtcatttgtcagtatgttgctcttaaaagaaactgagtctccttatagagaaatcgttatacatcttgtaaacctgagtttgcaaatgttgatacttggaggccctcaatggaatgaaatggagaagcaaaattttttaagtagcaaagtgccttgtccaaacattagtcttttccagagacttctataagagggaaccccaggacagactgcccccttaggaccccggggacggtttttctgataaggatacgatttctctgctagggacacaactacatctccctcccacattctgaagggccaggaagcctttgccacgcttggtgcttcttcctccatcaaatgctttctgaatcaactggatctgccgctgagcacggtaaggcggatgatctggaagctttccaggtgctttaggaaagaagcggcatttcagccacggtttttggccttcataatcaatgtcagcctctaatgctgtctggaatagcagatgagtgcctgtctgacccggaaaccttttgttcgccgcgccccccagctttgttactcgctgatggaggctggttttgtcatctgccgtagctgtcttaccggtctgaccgttcctttacctatccttcaaatgagcagaagaataatttcttcgtgggggactgatgctgagcagatgttcacagagccccagaggatcaccgtgacaggtccctcagtaggactgagattgtggttatgtaataattttcccttctcattttgattaaaaaaatgatgcatgcgcatctctgagcgcaaatgtgtcaatgctaattggacatgcgcattcgagacggctccatacggaacggaatgggaccgtggccccgaagcaacactccctcccagcaccatattacgcaaacaaaatgattcaggggaagaattcctccattaaaaagaatttgaggtgtccctgatctttgggtgccaaacattgtggcgaagggctccgccggcccctacagacgcgaacttggtgccgtagtctcgagtgccctctgccgtaacttgggaaaccagcgcttctttagggagccagccatgtctcctgcaaggaaggaaaatgaactacgctttatttctcaaaagtttccgtcagaatctggccttcctgctgtttcgagttatttgggttgggggccaggctccctcaaagcctggagtgtcccgttaagtcagcctcaatgttcaccccaaagatggaactggggcgtcttggaacaaaaaaaggaaactgaccaaaatacgatgactctcgggattgaaatagagcgccacgatattttggagacatcttctgagagtataatctgggtctgattttatacaacctcaagctgttgtgttctgagcattatttattcattttaacgttcactcgaattttgtttttttgcccatcaagcaatgaaaagcttagatttggcccaaaatgtggaggtcttcactgggtttgtctgtgcctttctttcatacctcagtatggcttaaagaccaaatgttcatttactctgtaagtgaaaaggatatttgcccattaatttcaactccagtgctcaagccccatataagacacagttaatatgatctcactttggatgacactcggaggagcaggaagacaatttgtggggggaaaggaataagaggcagcgcacatttaacaggaatgttaatatttactggtcgttgtgctcgatatctggaaggcggcacagtcactaagtagggattacatcttcaattaagtagtggtggcaggggacttagcgatgtttcacagagggaaactgccggaatcatactttaaggagaataatttttttaaaagctacaaaaaaaattgaaagaaaagcccgagggaaaaaaatagagggaacatttctgtttagggaatcctaatattttggctgaacacattatgtaaaattaaatactattttaaaccaaggagatataatatctaattaagtttttgtggttgatgggcttagagaggattgtgaatgttacatccattgaactgaaagaagtagaaaaattaaataacactgttctatagtgactttcacccagacatacaagcagacttccatattccactattactctgccctacctacagctcactgaagacatgaaagagaaaatgagaatgagcacagtgatctcgttaaggcttgtaacaaccccaaggagcagagaccaagagttgtcagccccatttccaagcagcagccatgggctccaagtgaacaagggacttgcatctggggttatccagtgagtcagggtggagagagaacagaaccaccaccttcccgctgcatctggaacttctgtcccagcatgccctgtgctccccagcaagaagaatgtcacactggggaagtagaggcttcggttcctgaccagagttatcagggagcaccaacattttaagactttttggagttttaggagaatttcaatgtaacgtatgtggtgacaggagatggaagatagttttaaaagaatattgacttctaagattaattattacatgacggcattttcaagtaactctatacaataatttttttttttttgagatggagtctcgctctgtcgccaggctggagtgctgtggtgcaatctcagctcactgcaacctccgcctcctgggttcaagtgattctcctgcctcagcctcccgagtagctgggactacaggtgcgcaccaccacacccagctaattttttgtatttttaatagagatggggtttcgccacgttggccaggctggtcttgaactcttggctgcaagtgatctgcccaccttggcctcccaaagtactgggattacagacgtgagccaccacgcccggctacagtaatttttaaaggtagaaaatcaagcctgggtgtggtggctcacatctgtaatcccagcactttgggaggccaaggcaggcggatcacttgaggccaggagttcgagaccggcctggccaacatgaggaaaccccatctctactaaaaatacagaaattagccaggcacagtggcacacacttgtagtcccagctactcaggaggctgaggcaggagaatagcttgaacccaggaggtgaaggttgcagtgagccaagatctgctactgcactccagcctgggccacagagcaagactctgtcccaaaagaaagaaaagaaaatcaatcccagcactttgggaggccaaggtgggcgaatcacgaggtcaggagatcgagaccatcctggctaacacggtgagaccccgtctctactaaaaataaaaaaaaattagccaggtgcggtagcatgcgcctgtaatcccagctattcgggaggccgaggcaggagaatcacttgaacccgggaggcagaggttgcagtgagcccagatcgtgccactgcactccagcctgggtgacagagcaagactctgtctcaaaaaaaaaaaaaaaagacaagagatagctacgcgatttttggtgggcaatttttaaaaacttagcttgaatagggagccttctcaaactgcataaaactgaaatacggtacccacagataccaaaaggcaacatatacaaaggcaatcttccaagcacaaagactgaatgtttcaatcatatttcattgttttctccctttaaaattttattgttagagatatacaataaaagaactaaagaccactttaaaaagtttaataatatctattctgtctatagttccccacataaattaagcagggtcatatttcatatttgaagggaataaaagaacttccaggacatcttcatatagagctgagagaaatttggtgagaaggctctttgaaattagaatattcaaattataatttgataataagaaagtattttaaataattaaaaatgagaaatgagcttcaagaagttgctctatggtggtcatttttgtttcaattgctacaagcaagaagtagttttaaaaataaatcaccagggcacagcaagtatttctgacaggcacttgcaggcaggattttataaattccaatcatttaacaaattgcaccattaaaagtcataataggtctaaaagccattcttaaaagaacttactaagtaatttgacctacataatcatcttgttaaattcatttgacatcatgagacagttagtgaaatatgcatagtacattatattaaagaaaaaagtacccttcaattggtatctgattgcacttttcaattgcagctattagttgtctataaaactcctagacatgatttgatttgattttattactgttatatcattttactttgtaacatataggggtggagattacaggtcttcgattgcttactaggaaatatttaacgaaggatgttttatttattagcataaagagacacagtggattattgggtgattaaagtgacgatacggctgctgtacttgtcaaaaatatagccctaattcaatagcaaggcgacagagagtctatgagctgatctatgcctaagcaaactgactctgaaagcaggacattgccctcttaaaaggatctttgtaaatttctataattgcacattatcaaaaacaaacagcagcgataacaaacccacagagtgagttctcaattggaagtttactttctatctgccaagagcccctactttttatcttttgcattcctaacatctcaaatcaataatagagaatgatacttaatgttactaatctttgtggcaaacacttttttttttttttttgagacggagtttcactgttgttgcccaggctggagtgcaatggtgtggtctcagctcactgcaacctccacctcccgggttcaagcaattctcctgcctcagcctcccgagtagctgggattacaggtgttggccaccacgcccggctaatttttgtatttttagtagagacggggtttcaccatgtttgttggccaggctggtctcgagctcctgacctcaggtgatacgcctgccttggcctcccagagtgctgggattacagacatgagccaccgtgcccagccggaaacataatatttttattagaagtaaattgaaaagaaaatgaaataaatggagcaaaggaagaaaggaactagcatttattgagtgccttctgtgtaccaggcactgttctaagtgtttcatcagtactatcaggctatcttttccttttttttttttttttttttttttagacagagtatcactctgtcattcaggctggagtacagtggcatgatctcagcagctcaccacagccttgaccctctgggctcaagtgatcctcccacctcagtctcccaagtagctgggaccacatgcatgagccaccacacctggctaattttttttaacgtttgtagagatggggttctccttgtgttgcccaggctggtctcaaactccagggctcaagcaatcctcctacctcccagcttcccaaagtgctgggattacaagcatgagccaccacgcctggtcataaaaaaaaaattatttttaaatcttgaattggcacctattcactatttgtcctttgttttccttcggttcatgccatttaagtcctacaagtagcttgtatcaccaggactactttgcttcgcctgatagtgaggaaaaacttgctatcacttgtcaattaacatgtttactgcaatcacaatgtctatatttcatctattcttaactcttaaaaaggatcagaattgggcagggtgcggtggctcatgcctgtaatcccagcactttgggaggccgaggcgggcggatcacaaggtcaggaaatcgagaccatcctggctaacacggtgaaaccccgtctctactgaaaatacaaaaattagccgggcgtggtggcgggcgcctgtagtcccagctactcgggaggctgaggcaggagaatggcatgaacccgggaggcagagcttgcagtgagccgagatcgcgccactgcactccagcgtgggctacagagcgagactctgtctcaaaaaaaaaaaaaaaaaaaaaaaaaaatcagaattgtactctgtgtgtatgtgtataatgtggcatacaatatgttttccctaaaatatcagctctgtgctgactcctgtgaatttaaagaactcttataagattataaactacaatcacatggtcatgtaaatcattaatttgttctttaatatgtgttatttgtcttatttgcatttcaggacacagtgatatttcaaggtaaaatattacagattctgttttatttcaggttataagccaagatatggtgtagaccctttctcaattattttactatgttttaagctgaaatccacccagcatatcacaaacctttcctgcgctttaggactttagattgacagcgccctctgctgtaactctgagtttgtcacactattctaaacctcactaagagtcagcacggagacagacacatccctgctgaaacggatctccaggtcaggatcagctcctcagcttttagggtttgaacccaaatactgacagtaactcaaatccgggcaggctctggggaccagtgttcactgactgactgccaggatttttctttccatcccaccctctcccctgagttcctgggcgcctgcattcagacccttagacgatatataatgggcattttaaatttagcacttcccaacccgacctcttgactccaccactctcagcccaagtgtgacttaactcctggccttcctgtacccattaatggctcgccactcactcagtggctcaggccccagcgctgggagttctctgacttacctcacctggcacataggaggccctttataaatatctactgcatgggccaggcgcggtggctcacgcctgcaatccagcactttgggaggccgaggcgggcggatcacctgaggtcaggagttcgagacatggagaaaccccgtctctgctaaaaatacaaaattagccaggcgtggtggcgcatgcctgtaatctcagctactcgggaggctgaggcatgagaatcacttgaacccagaatgtggaggttgcagtgagccgcgattgcaccctgcactccagcctgggcaacagagtgagactctgtctcgggaaaaaaaaaaagttggtcctgcattcgcttaggagaaaatagttggtttaagcaaaatcctaaattaattctaaatttctagccaggcatagtggttaacgtttgtaatcccagcactctgggaggccaagtgggaggatagcttgagcctgggagtttgaggctgcaatgagccatgattgtaccactgcactccagcctggttgacagagagagagcctgtcaaaataataaataaataaacaaataaataaataaggctgggagctcatgcctgtaatcccagcactttgggaggccgaggcagggggatcacttgaggtcaggagtttgagaccagcctggtcaacatggcgaaaccccgtttctaccaaaaatacaaaaattagccaggcgtggtggcaggtgccggtaatcccagctacttgggaggctgaggcaggagaattgcttgaacccaggaggtggaggttgcagtgagctgggatcacacctctgcactccagcctgagtgacagagtgagactctctctcaaaaaaacaaataaataaaaatttaaaatgaaataaataaatttctaattaattctaaatttctaaattatattggctagttcaatagttcaatttagggctgggcacagtggctcacagtactgtaatctcagtactttgggaggctgaggcaggtggatcgcttgagcccaggagtttgagaccagcctggacaacaaagggaaaccctgtctctacaataaatacaaaaattagctgggcatggtgcacgcctgtagtcccagctacatgagagactgaggtgggagaattgcctgagcttgggaggttgaggctgcagtgagccataagccatgtcactgcactccagcatgggtgtcagagtgagaccctgtctcaaaaaaaaaaaaaagaatttaatttaaacagacactctttggactgggcatggtgggtcacgtctgtaatcccagcactttggggggccgaggaaggtggatcacttgaggtcaagagttccagatcagcctgaccaacatggtgaaaccccgactctactaaaaatacaaaattagccgggcttggtggcgcatgcttgtaatcccagctacttgggaagctcaggcaggaggatcgcttgaacccaggaggcagaggttgtagcaagctgagatcacaccattagactccagcctgggcaacaagaatgagactccatctcaaaaaaaaaaaaatacataaacagatactctttgatttaaaatatacaccaataatacacattttacattttgacatgtataattcaaaaaattaacaggctaatcccactactcagagataacttttatttattgatttatttattttgagacagagttttgttcttgttgcccaggctggagtgcaatggtgtggtctcgccactgcaacctctgcctcctgggttcaagcgattctcgtgcctcagcttcctgagtagctgggattacaggtgcccgctaccacgcccagctatttttttttttgcatttttagtagagacagggtttcaccatgttggccaggctggtctcaaactcctgacctcaggtgatccgcccacctcggcctcccaaagtgctggtattacaggcataagccatcgcacccatccttttttttttttaagacttgttttattttaatggctgatctatgtaatcacaaaggccagtatgtacagacaaagggggagcttttgtttcttcatctcttcgtccttcgacaaagtgttgatgatcccctccttcttggcctggaggcactcttcacgttgctttcgtgcttccttggtcttaggcctgcaggcctcagcctggtcagccaggagcttcttgccggccttgtctgccttcagcttgtggatatgttccatgagaatctgcttgtctttgaacacactctccttcaccttcaggtacaggctatgatacatgtggtgattgatcttcttagagtcacggtatcttctgagcagcgggcgcagaatcctcattctgctcaccacgtgaccttctctggcattggggcattggctgtaccctttcgcttacccgtgcccatgtgcctgcccttccggtgggccaaggtgtttttccggcattgagcctgggaatggacagtcacaggcttacagataatcagcccatctttgatcagcttccggatctgctgtcgggagttggcactggcgatttcattggcctcattggggtccaaccagaccttcttcttgccatagcggaggacactagcggcaggcctcttctgaagcccgagcatgctcatggctgcagccacagcagagaagagagataacttttagtaacattttggtgttttcttaaacatagactttattctttacttgtttgtgtgtgtgttcctcgcataagaacccgggctggctcacactgcggccttctctctggcctcttccctcttgtcaccatcttcttctagctttattgaggtataactgacaaataaaaagttgttggtatttgaggtatgcaacctgatgtttcagatgcttgatattcacaatggtatcattgtgaatggtaccacagtcaaactaattcacataccgtgtgtgtgtgtgtattgagagcataagtataccatacagcattgttaactatcatcaccatgctgtacatcacgacttattccagaattattcatcctgcagaactgaagctttgtacctttgaccagcgtcactcggttactaccatctccccaaaccctgacaaccacctctaccacctctactccatgcctctatgaattccactgctttagagcccacatgtaagtgaggccatgcgctttgtctttttgtgcctggcttatttcacttagcataatgtcctctaggttcatccatgttgctgcaaatggcagaattttcttctttttaaagggtgaataatattccattatatgaatacacacacatatgtacactgcatatatgtatacatatattaatacatatatacacatacatatctacacacacacacacacacacatctatcacattttatctgtccatccttccgtggacatctaggctgttttcgcatcttggatattgtgaataatgctgcaatgaacatggcagtgcagacatttcttcaagatactgatttcagctaggcgtggtggctcacacctgaaatcccagcactttgggaggccgaggcaagcagaacagttgagcctatgagtttgagaccagtctgggcaacatgatgaaaccccatctctacgaaaaatacaaaaattagccaggcgtggtggtacatgcctgtggtcccagctactcaggaggtgagaatgaaggatcgcttgagcctggaggcagaggttgcagtgagctgagatcacaccactgcactctggcctgacagagtgagaccctgtctctaaaaaaaaaagaaagaaagcaaaatgtctattcaagtcctttacccatttgtaaataaattgttttttctctttcttttttgttctttttgctactgagttgtttgagctccttatatgttttggatattaacaccttctggccaggcatggtggctcacgcctgtaatcccagcactttgggaggctgaggtgggtggatcacctgaggtcaggaagtcgagaccagcctggccaacatgacaaaaccccatctctactaaaaatacaaaaaatcagccaggtgtaatggtgcatgcctgtaatcccagctgcttgggaggctgaggcaggagaattgcttgaacctgggaggcggaggttgcagtgagtccagattgtgccattgcactccagcctggtcaacagagtgagactctatctcaaaaaacaaaaacaaacaaacaaaaaaaacaaaacaaccacaacaacaaaaaccaccttcttggatatatggtttgcaaatattttctcccattccataggttgtggcttcactctgttcattgtttcctgctctgcagaagcttttcagcttgatgcaatcctagttgtctttctttgcttttgtcgcctgtgcctttggtgtcgtatccaaaaaatccttgcccagactaatgtcaagaagcttttcctctgtgttttcttctagtagttttactgtttcaggtcttacatttatatctttaatccattttgagtccatttttgtgacaagtgtgagatccaatttcagtcttctgcatgtgccagttttattgaagagactctcctttcccccactgtgtgtttttggcatctttgttgaaaatcatttggctatagggcgggcgcggtggctcatgcctgtaatcccagctctcagggaggcagaggcaggaggatagcttgagcctgggagttcgagacctgcctgggcaatatagcgagaccccattctccacaaaaaggaaaaaaaagaaaaaacaacaacaaaaacaaaataagtgaaaatcagttggctataaatccgtgaatgtattttggagaccattggaattttgataggaattgcactgaatctgtaggtcactttgggtagtacagacattttaacaacgttaattcctccaatccatgaacatggatgtctttccatttatctgtgtcttcttaaatttctttttctttctcttttttctttttctttttttgagacagagtcttgctctgtcacccaggctggagtgcaatggtgcgatttcagctcactgcaacctctgcctgccaggttcaagcaattttcctgcctcagcttcccaagtagctgggactctaggcacgcaccaccatgcctggccaatttttgtgtttttagtagagatgacgttttgccttgttggccaggctggtctccaactcctgacctcaggtgatccccgcacctcggcctcccaaagtgccgggattacaggcgtgagccaccactcctggccttaaatttctttcatcaatgttttataattttcagtgtacaagtcattcacctctttaagtttattcctaattattttattccttttgttgctattttaaatgggattgttttctttttttctttttttttttcgagacagtgtttcccccgtcacccaggctggagggcagtggcgcaatctcgatctcggctcactgcaacctccgcctcctgggttcaagcgattctcctgcctcaacttcccgagtagctggaactacaggcgcgtgccaccacgcccagctaattttttgtgtttttagtagagatgggtttcaccgtgttagccaggatggtctccatctcctgacctcgtgatctgcccacctcggcttcccaaagtgttgggattacaggtgtaagccaccgcacctggcccatatatgggtctttattgtgttaaggtaacttccttttataccttctttttttatttttatttttattttttgagacagagtcttgctctgtcacccaggctggagtgcagtggcgtgacctcagctcactgctacctctgctttccaggttcaagcgattattctgcttcagcctcccgagcagctgggactgcaggtgtcccaccgtgcccggctaatttgtgtatttttagtagagacagggtttcactgtgttagctaggatggtctcaatctcctgacctcgtgatctgcccgccttggcctcccaaagtgttgggattacaggtgtgaaccaccgcaccctggcccatatataggtctttattgtgttaaggtagcttccttttataccctcttttttaattttaattttttgagacagtctcgctgtgttgcccaggctggagtgcagtggtgtgacctcagctcactgctacctctgtttcccaggttaaagcgattattctgcctcagcctcctgagcagctgggactacaggtgtgccaccacgcctggctaatttgtgtatttttagtagagatggggtttcaccatgttggccaggctggtctcgaactcctaacctcaggtgatccacctgccttggcctcccaaagtgctgggattacaggcgtgagccaccactcctggattttttttttaatttttatttatttatttattttttgatacagggtcttgctctgtcactcaggctggagtgccgtagtatgattatagttcactgcagcctcaacctcccaggctcaagcaatcctcctatctcagcctcctgagtagctgggactgtaggcacatgccactatacccagctaagtttcgtattttttgtagagattggggttttgccatgttgtctaggctggtctcgaacttctggactcaggcagtcctcctgcctcagcctcccaaagtgctgagattacaagggtaagccaccacaccctggcctatacctatttttttaaaaataatttcaacttttattttagatttaggggtacatgtgctggttcctttcttcgttccttctctctctctttcttccttcctttctttcttttttgtttttcgttttttttgtctcactttgtcacccaggctggagtgcagtggcgccatcttggctcactgcagcctcaacttctcgggttcaagcaatcctcctgccttagcccccaaagtagctgggactacagtcgcatgccaccatacccaaccaatttttttgtattttttatagatatggggcttcactgtgttgtccaggctggcctcaaactcctgagctcaaatgatccacctgcctcagcctcccaaagtgctgggattacaggcatgagccaccatgcccggcccatgtgctggtttcttacatgggtatattgtgtgatgctgaggactgagatgtgaatgatcttgttaccccgatagtgagcatagtactcaatggttattttttcaacctttaactccctccctcccccatctagtagtcctcagtatttattgttgccatctttatatccatgagtatccaatgtttaactctcacttattaagtgagaacatgcagtatgttttgtgtacctgcattaattcacttaggattatgccctggagctgcatccatgttactgcagaggacatgatttcattctttttatggctgcatagtattccagggtgtatatgtaccacgttttctttatctgctccactgctgatgggcacctatgttgattccatgtctttgctactgtgaacagtgctgtgatgaacatatgagtgcatctatctttttggtaaaacagtttattttcttttggatatatacctaataatgggattgctgggtcgagtggtaattctgttttaagttatttaattacaggtgcgcactaccatgcctggctaatttttgcatttttagtagagacagggtttcaccattctggccaggatggtctcaaactcctgaccttgtgatcccactgcctcagcagtgggattacaggcgtgagccaccacctggaaacattatttttaatcactgccaaacattgtcattgtctgaatgtatggcaaacctttcaatgcatctttgactatttctttaggatacacctctagaagtgaattacagaatcaaagggtaagaattttaaagataacacgctacatcatcttaaagttgtaccaattcatattccaatcaggaagatgtgaaagggcctgttttcttgaaccctccccaactctgcatattagcaattgtgttggtcagagttgcactgcagataacagaatccactctagctgaaagcagagttatcgccagttattaggaaatcattaggacattgggagaggctggtccaagctcccaggaataaacccagaaccatattgcaaaactggttcactaagggagctatctctgccactgtctggaagcctgggaataagaaagttgtggctggaggcagtggctcaagcctgtaatcgcagcactttggaggccacgacgggtggatcgcttgaggtcaggggttcgagaccagcctggccaacatggcaaaaccctgtctctactaaaaatactaaaattagctgggcatggtgcctgtgcctataataccagctacttgggatgctgaggtggaagaattgctcaaacctgagaggcagaggttgcagtgagccgagatcaggccactgcactccagcctgggtgacacagcgagactctgtctcaaaaaaaaaaaaaaaaagaaagttgccataatgactgcagtctctaggctcacagtgcccctgtcatgattcacactatcaaaatggatgcatcttaactctcgttaaactaggaattggatcctgggtcttctactacaagtgccacagcagctccaaatgcctccgtaacctgggttactggccaaaacagcataactgacagaatgatggcttctgcttcataaatccaatttttatttttcaaatttcgtatgagcacattggggagtctgagcaatgtagtgttttgctttccagctttcagcaggcagtaagacatgatacacagtggctggaatggagctgaatgagccagtctgtagtatctgccacagccaattcctttggcagcattcacacattgctgtcttttttttttttttttttttttttttttttgaggcagagcctcactgtcgctcaggatgtagtgcagtggtgcgatctcggctcactgcagcctacacctcctgggtttgagcgattctcctacctcagcctcccgagtagctgggattacaggtgcctgccaccatgcccagctaatttttttgtatttttagtagagatgaagtttcaccaggttgggcaggctgatcaataacccctgacctcaagtgatccgcctgccttggcctcccaaagtgctggggttacaggcataagccactgtgccaggctcatatacagccttctgccagtaaatctcccaaacaaaaataatagcaaaacccaacatactctcctaagggacccatacttcatacaattaaaaatgagcttatctcaaaaaggagacccaagtctcattgcatccatctctacatgatgttcattcctcttctagtataatcacataccctgtaatctatagactcaatgataaagtttactacccctctatattaaatatcctgacttactccatataatgtagtaggtgggctaggcacggtagctcatgcctctaatcccagcactttgggaggccgaggcaggcggatcacctgaggtcaggagttcgagaacagcctgaccaatatggtgaaaccctgtctctactaaaaatacaaaaattagctgggtgtggtggcacatgcctgtagtcccacctactcaggaggctgagacaggagaatcgcttgaacccaggaggcagagattgcagtgagccaagatcgtgccactgcactccagcctgggtggcagagcaagactctgtcaaataaataaataaataaatgtgtttgaaattttcagggttagggccagggtcagggtcagggtcagggttagctgagccagtgaaagtcaagaagaagacagttagaggatcagagagaagccgttaaccagggaccacgaaaagaagccaacgacgtctatagaaggctttgtgtctggtgactgggctgaagttgctgtaggtcaacagagctggaagctgggaatcaaagctgaatgtgaaacaggggagagtgaggaaaaattagaactggaacccatgaaggtatattggaacccacatctttttttcagcacctccaaccttgatgccgtgggttactgcagaaaaagccagtgccctctgccacagagctgcacatacacctggcccaggccccagagggcctgaaagagaacattcggagaggcgaagccagcaagaggtggcacaagtgagtcacggtggcacccggagaccttagagaccaaggtaggaggattgcttgatgccatagtgttgggctatgtcacccaggctggtctcaaacacctggtcctcactcctcagtgatcctcctacctcagccccacaagaagctgggattgcagatgtctgcagaggggatttattgtgggaattggctcacatgattatggaggctgaaaagtcccacgataggccatcagcaagctaaagaactagggaaggcagtagtgaggctcagttcaagtgcaaaggcctcagaatcagggaagcggatgctgtacctctgtgttcaaggccaaaagcctgagaacctgggggctgctggtacaagtcccagattccaaaggttatagaacctgggccaggcagggtggctcctgcctgtaatcccagcactttgggaggccaaggcaggcagatcactggagatcaggagttcaagcctggccaacatggcaaaaccccatttctactaaaaatacaaaaattagccaggcatggtgctgcgtacttgcagtcccagctacttgggaggctgaggcaagagaatcacttgaacctaggaggcggaggttgcagtgagccaagatcacaccactatactccagcctgggcaacagagcaagactccatctgaaaaaaaaaaaaaaaaaaaaaaaaaagtcagagaacctggagttctgatgcccaggggcaggagaagttggatgtctcagctccagaagagaaagaacaaattcactttttttttggtttttttattcaatctggggttcatttttgcttttttattcaatctaggtttattcaatctaggggttcgctgatctgggaccctccagcaagatggtattggttttggtttcagatttggtggaggtggtgatggtggtttccacttggccttttctaccctaacagcgctcattccacaagtcagggagccaatgtggggattcagctgattggatggtgttcatctactttggtgagaatagatcttccacactcagtcgacgattccaatgccaatgtattctggaaacactctcacagatacacacagatgtaacgctttaccagctctctgggcatccttaatccagtcaattaaccatcacaaacaccactggatcttctgggtcatatggcccaatgtgggagcagcatggtagcctggacttgctgcagagctttcacttgttccagactctaccgaaacctggcagcctttgggttactcagtacacacaatgcaacagcatggcctagaaagatacatgttgccttcagaatccaaagaggctcacaaagcattgtgctactttcttggtggcagaagggaccagacagagaaacttgcccttcatcttggaaggaatatctcaaaatgtcccagaacagtgaacccacagaaagtttactgaggtggcagatgcttgcaattttgtgggatttacttcctatgctttgggatgtaagtgtctcaccaaaatagctggagtagttgctacttcctgctcaccaggtccaaccaacatgatgtgataaaaggagtgaaccaacctaatgtcttatagaatggaaatgcaatccagttccttccagactgaagcaggacagagggcctgaggggtgattacccctgagtcaggacattgaaggtgtattggtggccgtggcagctgaaagtaaactgtctgatggcgttaattaacgcgtatgggctgagcgtggtggctcatgcctgtaatcccaggactttgggaggctgaggcaggcagatcacctgaggtcatgaattaaagaccagcctggccaacatggtgaaaaccgatctctactaaaagtacaaaaattagccaggcatggtggtgcttacctgtaatcccagctactcaggaggctgaggcaggagaattgcttgaacccgggaggcagagattgcagtgatccaagatcatgccactgcactccagcctgggcgacagagcaagactctgtcttaaaaaaaaaataataaaataacagatatggaggggaaaagtgttctccaatagctgaacagcagggcctgggggatgtggtgacttatttcagaaatgaaaccatatctaggacagcaatgcagtggcagtccctactgattaagtttacaaaatccactgtcattctccagggttcacctgtcttctgcacagactgaaaaggtgagttaaatgaggatagggtaggaatcaccacctcttcagattctaccaagtccttgatggcgacattagtctctgcaatccctccagcacgatagtattggttttggtttcagatttggtgggggcggtgatggtggtttccacttggccttttctaccctaatagcgctcattccacacgtcagggagccaatgtggggattctgctacttgctgaatatatctatgccaatgatccatgctgaagaagaaaatttttttttaattattattatacgttaagttttagggtacatgtgcacaatgtgcaggttagttacatatgtatacatgtgccatgctggtgcactgcacccactaactcgtcatctagcattaggcaaatctcccactgctctccctcccccctccccccaccccacaacagtacccagagtgtgatgttccccttcctgtgtccatgtgttctcattgttcaattcccacctatgagtgagaacatgcggtgtttggttttttgttcttgtgatagtttactgagaatgatgatttccaatttcatccatgtccctacaaaggacatgaactcatcattttttatggctgcatagtattccacggtgtatatgtgccacattttcttaatccagtctatcattgttggacatttggcttggttccaagtctttgctattgtgaatagtgccgcaataaacatacgtgtgcatgtgtctttatagcagcatgatttatagtcctttgggtatatacccagtaatgggatggctgggtcaaatgatatttctagttctagatccctgaggaatcgccacactgacttccacaatggttgaactagcttacagtcccaccaacagtgtaaaagtgttcctatttctccacatcctctccagcacctgttgtttcctgactttttaatgatcgccattctaactagtgtgagatggtatctcattgtggttttgatttgcatttctctgatggccagtgatggtgagcattttttcatgtgtcttttggctgcataaatgtcttcttttgagaagtgtctcttcatgtccttcgcccactttttgactgaagaagaaaattacaagctcaggttggccaattaccaattcaggacctggtatgagtcagaaggcctctatggtaacacttaaggcaccttcatcaagagagcacaccatgctgaagatcacacccaagacgtgatagcaacagaactacaaagaagcctgaatctgcagcctttgctactctcctatgccaccagaaggaagaaagggccccttagacccggaatgctgatatctagatagaccttatgtgatctcattgaaactccagattcccctgaacccgtgggcctgcgagagtggcccattatcccctactggtatacagcagcatcccctttcttgaaaaatgtatgtgtttcaaccaaagtggatgcctttcaaaatgatatttgccctcctcgagatgggttaccacctcccctatggctatgagaccaataatcaaagtcaagtcacagcgtggcctagctgaggaagtataggacctgctagggaagaaaatggtagagctgcagggcccagaacagggaaaaaagtacccactgggaatggatactaagggatgaagggagaatataagacgcagtaaggaagagcttgttgatatgaaggatccttccatggctcaggattcagcaccctactgagggttcctggtaccagccccagttgtggtggctcctggaagcttggaaaaactgatggtgcacataaataaaggtggggcgtgctagaaaggtgtcagggcacagtgttgaggaagtggccaaaacactcattgtgtaagacctgagaacctaccagatgagcaggcaaaggagggccgagagattctcgcttttattaagtgatatgaaatgagttagtgagggagccattggcatcaccgagaagctcagtattggctgttctgtggggctagatggcagttcttaactaccaaaggcaaggtggtggaatgactctaatgggcagcaaggctggaatggccactgggagacttgactcccagggatcgcttataatgacaaataggccctggtgttcctagggacaagaaagtgggcagccaacaaggaaatggcaagtatttagatgctctggcaagatatatgtgctccagagggcaagaaattaaaccctgcaaaggttcagaaaccagcgaagctagcgaactgttcaggtaccagtgcgggatgtgggaagataggtcaagtgcattattgcatctggcaactcccacactaagaaagacgcacaaggcttgataaaagcctcttgagttttggatgttctgctctcagaaatattgttctgacccatatatcagatatcaggtgacttgaaagaatgccaggtctgagtagtgggcagggccagaaagggctctgcagcagctccaggctgcagcataactgggcctgccatctgggccatatggcccaacagatcccatcatgataaggttattggtgataaacacaccatgtgaagtttctgtcaaacccctaaacagagttttggagcaagggcattctatctgcaatagagaaccacttaagaaaatgggtttttggagtgctactgtgtcctggtagagaccgagcatctgactgctggaatcaagtgactgtcagacccactaaatcctaaggttaggtgggcacagcctcattctactgtacagtggaagcagtacgcccaggattgggctcagacaggcccaaagggcacaagtaagttatatgaatgggtgggcccagacccatgtcacctgcctccattgcactaatccttctctctcagcttatacctatggcctcatgggagcttccctatgcccagatgacagaggaagaatcatgggctggttcagagatgggctacgccatagatggggctattttttgtataaataaaatatttgcatttaaaatgatgtgagttttaatccattgacttttatatttttccctcaactgctttaacattctgggggaaaactaggcatcaaaagctactttaaggtatagaaaagaagagatttgaataaggaaggaaggacaggcatggtggctcacacctgtaatcccagcactttgggaggctgaggcgggcagatcacccggggtcaggggtttgagaccagcctggccaacatggtgaaaccctgtatcttctaaaaatacaaaaaataaaaataaaaattagccaggcatggtgttgcacatctatactcccagctacttgggaagctggggcaggataattacttgaacccaggatgcggaagttgcagtgagccaagatcacaccactgcactccagcctgggtgacagagcaaggctccatctcagaaaaaaaaaaaaaaaagggccaggagcggtggcttacatctataatcccagcactttgggaggccgaggcgggctgatcacctgaggtcaggagttcaagaccagcctgaccaacatggagaaaccccatctctagtaaaaatacaaaattagccgggcatgatggcacatgcctgtaatcccagctactcgggaggctgaggcaggagaatcacttgaatctgggaggcagaggttgcagtgagccaagattgtaccattgcactccagcttgggcaacaagagcgaaactccatctcaaaaaaaaagtaaaataaaatcaaaatcagacaattttttttttttttgagactgagtttcattcttgttgcccaggctggaatgcaatggcacgatcttggctcaccgaaaactctgcctcccgggttcaaacgattatcctgccccaaccttccaagcagctgggattataggcgcccaccaccatgcccagctaatttttgtatttttagtagagacggggtttcaccatgttggccaggatggtcttgaactcctgacctcaggtgatccacccgcttcggcctcccaaagtgctgggattacgggcgtcagccactacgcctggctgacaatgtttttcttaaaccactggagtgtagagaacaaacccttatgaaaacagaaatgtcaattgtgtaatcattgctctaattaggtaaataggagtccttatgtatcgttacaagaatttccctgtaacatcctttatgaccctaagttcaatgacagtttgcatttggtggtaaaaggttttctccatggcctgaatgaagaccactagaaaacaccaggcactgagaacagtaactatcggatgactgttttcatgcatcccgtgtctggggacatggggcggtatgcctcgtctgtgtcagagggtggagctgatgtgtttggcgttgcataggatctggtgctccttttctcctggattcgcgtccccacccaggaccccctttcactcaacgttctgccctagcctagttcaaagaagtcatccaacttactctatccagtggcattggaatatatttgatatatatttgtctaacaacgtgacaaagggttttctccttcttttccggcaaggtacatcctgctgctttgaacttccaagtatgcctagtcaccttttaaaatgtagaacaggctgggcgtggaggctcacgcctgtaatcccagcattttgggagaccgaggtgggcagatcacctgaggtcaggagatcaagaccagcctggctaacatggtgaaaccccatctctacaaaaatacaaaaattagccaggcatgacagcgggcacctgtaatcccagctactcgggaggctgaggcaggagaatcacttgaatccaggaggcaggggttgtagtgagccaagatcccgccattgcactctagcctgggcaacagagcaagactccatctcaaataaataaataaataaaataggccaggcgcggtggctcatgcctgtaattctagcactttgggaggccaaggcgggcagatcacaaggtccagagtttgagaccagcctagccaacgtggtgaatctctgtctttcctaacaatacaaaaattagctgggcgtggtggtgggcacctgtattctcagctactcaggaggctgaggcaggagaatcacttgaacccaggaagcggaggttgcagtgagctgagattgtgtcattgcactccagcctgggtgacagggcgagactctgtctcaaaataaataaattaaataaaataaaatgtagaaccattttcagaaaaacgagaattgctttccttgtatgcgcttattatcttgactacctgaattgcaggagatttttatatattcacatgtcaaaagtcagcaactttcctgttggttcattgttgaatgtgctgtaactgaagtgttttgcaattaagatgagattcacctagaaaaaaaaaagctacttaaaaacaggtacagggaggtgcacgacttttcctttcgcttctggttccgatagggctcagcacagcaccgaaatttattcaaatttttgatattttgttatcatggatttttttgcattcattttgatttttaaaacattgcactaaaatattatttatcctggctactgattttttgacacccccaccccgccccagttttgtgcccaaggtgagttccttacacatcttaccctaatctcatctctgcagctcaactgtacaaaaaagaaaacaagaagaataatccagaaacatgagattgtgtcagaggcgtgtgacccagaacaactccatcttgaatgggggctgggtaaaatgaggctgaaacctactgggctgcattcccaggcggttaaggcattttaagtcacaggatgagataggaggtcagcacaaaatacgggtcataaagaccttgctgataaaacaggttgcagtgaaggagccggctaaaacccaccaaaaccaagaaggccacgagagtgacctctggtcgtccccactgctacactcccaccagcctcatgacagtttacagatgccatggcaccatcaggaaattaccctatatggtctaaacaggggaggcatgaataatccactccttgtttagcatatcatcaagaaataaccataaaaatggggaacctgcagtcctcggggctcccctgtctatggagtagccattctcttattcctttactttcttaataatttgccttcactttgcaccgcggactctccctgaatttttcctggcgcacgatccaagaaccctctactggggtctagatcgggactcctttcctgtaataattgggccggctgcagtcgctcatgcctgtaatcccagcacttcgggaggcccaagcgggtagatcacctgaggtcaggagttcgagaccagcctggccaacatggctgtatcttaaaaatacaaaaattagctggtcgtggtggtgtgcgcctgtaatcccagctactcaggaggctgaggcacaagaatcgcttgaacctgggaggcggaggctgcagtgagccgagagtgctccactgcactccagcctgggtgacagagcaagagtccgtctcaaaaaaaaaaaaagaaacaaatgagattggtaatttataggcagtagacaggaatagggtagaaaggataggggaagtgatatcactctgagccatcctttttgtatatttctgacttttaaaaccatgtaaatatttcacatacttaaaaatgaatgaaaatgtaatcagcaaagatgggatagggccccaaatggaatacaaacaaaaacaataaactggccaggctcagtggctcatgcctgtaatcctagcactttgggaggccaaggcgggtggaatgcctgagctcaggagttcgagaccagcctgggcaacaaggtgaaaccctgtctctactaaaatacaaaaaattagctgggcatggtggtgtgcgcctgtaaccccagctactcgggaggctgagacaggagaattgcttgaatctgggaggcggaggttgcagtgagccgagatcttgccactgtagtccagtctgggcaacagagcgagactacatctcaaaaaaaaaaaacaaaaaaacaaaaaattagctgtagcaaaaatgaataccaaaccacactggagatggaggaagaaaataactaccctaagtaactctggaaaagagcatttttggctatgtcctataaggccaaaaaaaataaataaattgagcataagtattatacttagtaatttttctcatggctatatatattagcatctctgaaactaatttacatgtattggagaaaataaatgtattatggacaatgaaagctaaatttctctttgtcagagaaagcagttaaaataagaaatgggaaaggctgcatgaaacctattattttggtttgcaattgtaggtatcaactagtgtgtgtgtgttgtgtgtgtgtgtttgtgcatcctacaaccaatgaacacaactagcacccgggtctggatttctaaataccattagccaatgaaaggaattacatctccgtgaagaaatggctgatttcagtgctagggcagggaaagtacaaaattaatgtgcaacagaaaataggaactgcacacacacaaaatgatgggttgtgtcaaaaggacacaggagcccatttgaaggggttccaatggccaaaccttaaacagtttaagcaagagaacaggctgggcctggtgactcacatctgtaatcctggcaccttgggaggccaaggtggaaggatctcttgaacccatggttcaataccagcctgggcaacacagtgacaccctagctctacaaaaaatttaaaaattagcccggtgtggtggtacgcacctgtagtcccagctactctggaggctgaggtgggaggattgcttgagcctgggaggtcaaggctgcagtgagccatgattgtgccactgcacttgagcctgggcaacagagcaagaccctgtctcaaaagaaaaaaaaggacagagagagaaaggaaaaagaaagtaaatactaagagtaatacattacgacacatagaataaagtaagaatcatgaatccatcctgacataaataaatacagagataagatggaaaagctcttccttacagtagaatttcaactagcaaatagacattgaaaagcattgtttggcaaatactatgctaatcacttttttaggtaaaaacacttcaacagaagctaggatgagtaggtaaaataatatagaaaatgggatagttacttggtcttaaagatcttcccacaaaatacttattaattacaaagggaaaagagtaactttgtagtggagaaacctctagacatcaccctatcaagtgatcaaagtgaacatccccagaaatgggaaaaatatcatgtgcctcctgacatgatacacacaggacattgcatgccttctctgatattcacaacaaaaatgaagaactgaaattagccacgaggaaacctcagccaaaccccagatgcgggctattgtacaagataagtggccagttatctttacaagtgtcagggtcatggaagacaaaggactgaggaacagttccagattacagaagattaaggagacatgcaacttaatgtgtgaggagatactgcactgaatcctgaaccagaaaaagaagatcagtgggacagttcgtaaaatttgaattaggtctatagatcagataatagtgctgtatcagtgttaatttcctggcttttatatatgtattatggctatgtaaaatgttaatatttgaggaatctggacaaaaagtataaggaatttcttctggtactatttttgcaacgtatgtaaatctggaggccgaatacagtggttcaaacctgtaatcccagcattttgagaggatgaggcagaaaggatcattttgaggccagaagtttaagaccagcctgggcaacatagggagatcctgtctctacaaaataaaataataaataaataaataaataaataaataaataaatctgggggggaaataatcagcctttgtagcctagtgttgcctcaccaagtaggtaaatttctcttggtaaggtccttttaagaattctctaagctggttacttctggatatgccaaattctggaagtgcagtcaagctcaccacagtcctctcttttctttgccagtacaggtagctctagccagcctctggacttcagacttttccaggcaagagttgggaagcattgaccaggcgtggtggctcacgcctgtaatctcagcactctgggaggccgaggtgcgtggatcacttgaggccaggagttcaagaccagcctggccaacatggtgaaaccctgtctctactaaaaaaacaaaaattagccgggcatggtgacgggcacctgtagtcccagctacttgggaggctgaggcaggagaattgccagaacccgggaggcagaggttgcaggtgagccgagatcgtgacactgcgctccaacctgggcaacacagcgagacttcttctcaaaaaagaaaaaagaaaaagagttgggaagtggactctgcactcccttaactccaggagacacaggtcacatttttccagatctctctcagcatcttttgctccagtacagggcagcactgcggctaatggagacttctgacttgacttcaggtccagggtaggaatagccctgacctctaggccagtaactcctttcaaagaaatcctctgtatcctctgatcagtctcctcaatgactctcctggttgctcttctctatagtctggagatacataatgaactatatgccataggatgggttagcaacttctagtaggttctgcttgattggtacactttagaaagagggagacatgtcagctattttcctcagactggagactgaactgggagccggagataatcagtaagaccccatttaacattctgtaggttctccatgctacccatagagggggccatacgacgccgttctggattctcatcttaacttaaagggaaatttccacaatgtccagagcctcgatgtcctgcaaatgaaggaggggaatatcctctagtttcttgcagcaggaacccacttaggtggcaccaacctggttccagttggaacagtatatctacaaaggaaaagtgttgggcgtggtggctcacgcctgtaatcccagcactttgggagatcgaggcaggtggatcacctgagcttgggagttcgagaccaccctgaccaacatggagaaaccctgtctttactaaaaatacaaaattagctgggcatggtggcgcatgcctgtaatcccagctacttgggaggctgaggcaggagaatcacttgaactcaggaggcagaggttgcagtgagccaagaccgcgccattgcactccagcctgggcaacaagagcaaaactctgtctcaaacaaaaaaaaacaaacaaacaaaaaagaaaagtgacggcatttacatcctaaatctgaagaatctaattctgttggcagcttgtaccattgttgccattgaaaacccttctgattctgcagccaattaagccgactgagttcctttcctcatgggggcccagtgtgcaatcgctgcaaacagcagcttccttggtagtatatgcagcctgtttattgtacgggttgctctacgggaccttggagacaggcttttcagatggatgttcatgtttctgactttgcattaccccagtgtaggctccggacaggcatgcgaggtgcctttggaaagccccagggcactgtggccagggttcacattggccaagttatcatgtccatctgtaccaagctgcagaacaaggagcatgtgatagaagccctgcacagggccaagttcaagtttcctggccgccagaagatccacatctcaaagaagtggggcttcatcaagttcaatgccaatgaatttgaggacatggtggctgagaagcggctcatcctagatggctgtggggtaaagtacatccccagtcgtggccttctggacaagtggcgggccctgcactcacgagggcttccactgtgctgccgccctcttaatattcaccaatacattctacttcctgtccaaaaaaaaaaaaattaaaacccttctgatgtcagtctcatgtcctcccggaatcctggccagcgggctgagctgagctttgctgctgccacaggagccactcctattgctggccacttcacccctggaaccttcattaaccaggtccaggcagccttctgggagctgcgtctgttggtagatactgatcccagggtggccactggcctctcacagcagcatctcatgataacctacctaccatacctctgtggaacacaggttctcctctgcgctgtgtggatatttccatcccatgcaacaagggagctcactcgggggtctgatgtggggaatgctggctcaggaagttctgcacatgcctggcactgtctcctgtgaacacccattagagatcatgcctgatctctgcttctacagagatcccgaagagatggaaaagctcatgcctgtaatcccagcacttgaggaggccaaggcaagcagatcacgaggtcagtaaattgagaccatcctggctaacgcaatgaaaccccgtctctattaacaatacaaaaaattagcccggcgtggtggcacatgcctgtagtcctagctactcaggaggttgaggcaggagaatcacttgaacccgggaggcagaggttgcagtgagccaagatcacaccactgcactccacactccagcctgggtgacagaacgagactccgtctcaaaaaaaaaaaaaaaaaaaaacagaaaagaaaaaaaaaaaaaaaaaaaagaacaggctactgctgaaaaagctatgaccacagaccacagaggaatttcagatttccgggtgaatggactgctccagctcctgagttcactgctagttagcctgaggttgcagactggtcggaggcatgcaggtacccagtgtctatccagcagttctctattgaagatgtggaacactcagcctgccatggaagactgaccttcagctctcattgctcaggccactaaacgggtaggaacaaccaatgtgtggtcttaagctgttcttccacaagcctttttttttttttttttttttgagatgaagtcttgctttgtcacccacactgaagtgcaatggtgcaatcttggctcactgagacctctgcctcccaggttcaagtgattctcatgtctcggcctcccaagtagctgggattacagacgcgtgtcaccacgcctggctaatttttccacatctttagtagagacggggtttcaccatgttggccagactggtcttgaactcctgacctaaggtgatccgcccgcctcggcttcccagagtgctgggattacaggcatgagccactgcacccagccccacaggctcttaagcaacatgaaaataagattgatggaaaataaactttagtttctaaaaataacaacagaggcaggcagatctcaccaggtgggtggatcacttgaggtcaggagtttgaaaccagcccgaccaacacggtgaaactctgtctctactaaaaatacaaaaaactagctgggcgtgatggcgcccaaaagctggaacctagcttttcacagtgcccagaacatagtattcatgcaacgctatgattccccactgggaaattgtagaagaaactgcaacttcaaaacttaggttaaaaagcaacagtcttactgggcacagtgactcacatctgtaatcccagcactttgggaggtggggggagcagatcatctgaggtcaagagttcgaaaccagcctggccaacatggtgaaaccccgcctctactaaaacaaaaaaacaaaacaacaaaaataaaaacaaaaacaaaaacacacaacgaaaattagccgggcgtggtggcgggcgcctgtaatcccagctacttaagaggctgaggcaggagaatcctttgaacccaggaggcggaggttgcagtgagccgacattgcatcactgtcctgggcgacagagtgagactgagtctcaaaaacaaaaacaaaaaaacggcagtcttaaactaatgtgtttgactaagatggataacagcgattggatttacacttccattttaaacaactaaaaacttgacaaaatatatgaaataagccttttcagacatcacatagtcagcacagggcaatcacgcttgagagaggaaacagatgattgcctagctgagttctaggagcgtttccaggccacagcaaagggaggcgggatgtgtggagtctggtcgtctccctgagttgaggtagcgttgggagtttggggaggcccaggtggctagcgtttgcagggcagagtactggggaggagagagttatacacagagagacccagagagctgcagaaggctcccttcatgtcttcaactgaagatgaatcagcaaaggcttgtatagagactgtcaggcctctgagcccaagctaagccatcacatcccctgtgacctgcaggtatacatctagatggcccgaagcaactgaagatccacaaaagaagtgaaaacagccaggtcttgcctttccaccattgtgctttgttcctgccccaccctcactgatcagttgaccttatgacaatacacgctccccgcccctgcgatcatgtactttgtgatattccccgcccttaagaaggtactttgtaatattcttcccacccttgagaatggactttgtaagatccgccccctgcccacaaaaaaatttctcctaactccactgcctatcccaaacctataagaactaatgataatcccaccaccctttgctgactctcttttcaaactcagcctgcctgcgcccaggtgattaaaaagctttattgctcacccaaagcctgtttggtggtctcttcacacagacgcgcgtgacagaaaccacttgaagccgggcgcggtggctcaggcctgtaatcccagcactttgggaggctgaggtgggtggattacctgaggtcaggagttcgagaccagcctgaccaacatggtaaaaccctgtctctactaaaaatacaaaaaaattagccaggggtggtggcgggcacctgtaatctcagttacttgggacgctgaggcaggagaatcgcttgaacctgggaggcggaggttgcgatgagttgagatcaagccattgcactccagcctgggcaacaagagtaaaaattccgtctcaaaaaaagaaaagaaaagaaaagaaaagaaaccacctgaagctggagaaagaaccccctcaaaagaaccatccctagacctcacacagacagggctgtggatcattggtattcaggcagagtgggaaaacctcatcctgcccagggcatccagtagagtagtcaagagtttttgcctcagaaatggtgagaaaactggctctagataacaggctgctttaattccacctaatgaaaccgaaaagcaagattcacaatgaatcaaactcattctgagaatcttaactgtgtgccaaaacaaaactcaatagtattattattttttgagatggagtcttgctctgtcacccaggctggagtgtggtggcatgatcgcagctcactgcaacctccgcctcctgggttcaagccattctcctggctcagccgccccagtagctgagattacaggtatgcaccatatgctcggctaatttttgcattttttggtagagacagtatttcaccatgttggtcaggctggtctcgaactcctgacctcaggtgatccacctgccgtggcctcccaaagtgctgggattacaggcatgagccactgcacctggccaactcaatagtatttttaatttattttttaaagacagagtctcgctctgtcacccaggctggagtacagtggcttgatctcggcttactgcagccttgacctcctggactcaagagatcctcctacctgagcctccaagtagctgggtagctagaactccaggtgcatgccaccccacctagctatttttttttttttttaattttagtagagacagggtctcactatattgcccagtctggtcttgaacttctgggctcatgctatccccctgccttggcctcccaaagtgctgagattacaggagtgaaccaccatgctagacagtattttttttaaatacaagaatattcagcatttggccgggcacggtggctcacgcctataatcccagcactttgggaggctgaggtaggcggatcacttgaggtcaggagtttgagaccagcctggccaacagggagaaactccatctctactaaaaatacaaaaattagccagacgtggtggcacgtgcctgtagtccccactactcaggagcttgaggcagaagaatcgcttgaacctgggaggtggaggttgcagtgagccgagactatgccactgtgctccagtctgggcaatagagggcgataccgtccccaaaaaaaaatattcagcactcatcaaggtaaaactcacaatacctggcatcctggcatccgatcaaaacttacctggtcgcaaagaaggaaaatatgacccacaaggaggataaaaatcagtcaatcaaaagagacagaaagtgcgtcagcctgcaccttccagaacctcgttgaggtttgctttctcctgttttcctcctcaaactccagctgcaaattcagcaatccaaggatgagtggattgttctcaccatgaccagaattcccctgggatctgtgctcggcagaggtgccatctcccgaacccagactggagttgatgatccagggaaggtgcttccgggtcctgaagagggctcctggaccaccagcccctgagccggcagcaccacagcccccactgcgcctgtccagaccttgtgggccctgggtgttcaggtgtgggtttagtgcagcactgcttgctgctcctgttactgcagcctcagccgcatagattcggcttgtgttggcacctctctgtttttgtgtgcgtctgtttcctggcaaggttgatcactcggcatgtccgaatactgcctacatcgtctcatggcacatgcaccctgcccacgtgtgtgaaacgaagcagaggatgtattgtgaacactagtggtcttggcttcttgtgttggtggcattgtccctagtccagtatttcccactgttgttgttatattattgagttggggtttttctctgtcgcccaggctggagtacagtggtgccatcatgtctcactgcatcctctaaatcttggccttaagggattctcctggctcagggtccctaatagctaggactaccgctggcgccactacacctggataattttatttgtttttatttttatttttattttttttgagagagagagtctcactctgttgaccaggctggagtgcaatggcattgcaaactctgcctcccgggttcaagcgaatctcctgcttcagcctcctgaacagctgggattacaggtgcctgctaccatgcctaatttttgtggggttttttgtttttgtttttgtttttgttttagcagagacagggttttgccatgttggccagcctggtctcaaacccctgacctcaagtgattcacccacctcggcctccctaagtgctgggattacaggcatgagccactgggcccagcctatttttttattttttgtagagacagggtctcgctatgttgcccaggttggtcttgaactcctgagcccaggcagtcctcccaacttggcttcccaaagttttgggattacaggcatcagctgctgtgggctgttattttgtattgtccaaaattttaactttccaactactcaaagttgttgaacttttacttttttttttttttttttttttgagacagtttccctcttgttgcccaggttggagtgcaatggcacgatcttggctcactgcaacctccgcctcctgggttcaagcgattctcctgtctcggcctcctgagtagctgggattacaggcatgtgccaccacgccgggctaatttttatatttttagtagagacggggtttctccatgtgggtcaggctggtctcgaactcccgacctcatgtgatcagcccacctcggtctcctaaagtgctgggattacaggcgtgagccaccatgcccggcctgaacttctacttttatgtaatatcttcagtccttagtaagtatcctctacatttgggataaatgttgtctttagttttcaactactttttctttggcttattctctctctctccctccctccctctctctctctctctctctctctgtgtgtgtgtgtgtgtgtgtgtgtgtattcatgttttcttaatctatctgaattgttgtgtcggttttccatgcgaatttccagttacctccacagtattcgtttcagaatgcttccttttggtgctactttttgatatctattttctcatatagtaaacatcggtttctggtaaaacacacacacacacactcagatataacacaaattataacacaaatgatggctgggcgcggtggctcttgcctgtaatcccagcactttgggaggccaaggcagttggatcacgaggtcaggagttcaagaccagcctggccaatatggtgaaaccctgtgtctactaaaaatataaaaaattagctgggtgtagtggtgcgcacctgtagtcccagctacttgggaagctgagacaggagaattgcttgaacccaggaggtggaggttgcagtgagctgagatcgcaccactgcactccagcctgggcaacagagtaagactctgtctcaaaaaaaaataaaaaaaaaaaaaaaggaaagaaagaacgcaaatgataaaattagcagaaaaagacaataaacagatattacattacatatggtcaagaaggtagaaaaaaacataggcattaaaggaaaacatgaatgatgtaaaaaaaaataaaaaaaagtcaaatagaacttttagggatatagcctggcgtgggtggcgcatgcctgtagtcccagctacttgggaggctaggcgggagaattgcttgaacccaggaggtggaggttacaatgagcggtgatcgtgccactgcactccagcctgggcaacagagtgagactctgtctcaaaaaaaggaactttcagagataaacagtatgtttaagataatgagagtccgggtgcggtggctcatgcctgtaatcccagcactttgggaggccgaggtgggtggatcacgaggtcaggagatcgagaccatcctggctcacagggtgaaaccccgtctctactaaaaatacaaaaaattagcagggcgtggtggcgggctcctgtagtcccagttacttgggaggctgaggcaggagaatggcatgaacccgggaggcggagcttgcagtgagccgagatcgcgccactgcactccagcctgggcgacgaagggagactccatctcaaaaaaaaaaaaaaaaaaaaaaaagataatgagaaatacactgaatgggattaacagcaaattacataataaacaaaagaagattcatgaacaatagggatatagtaatagaagttaccaaaaatgagccgggcgcggtggctcacgcctgtaatcacagcacttgggaggccgaggggggcggattacgaggtcagtagatcgagaccatcctggctaacacggtgaaactccgtctctactaaaaatacaaaaaattagctgggcgtggtggcgggtgcctgtagtcccagctactggggaggctgcggcaggagaatggcgtgaacccgggaggcggagcttgcagtgagccgagatcgcgccactgcactccagcctgggcgacagagcgagattccgtctcggaaaaaaaaaaaaagtagttatcaaaagtgaaacattgaggaaaaaaagactgaaaaaaaatagagtatcagtgagctatgggacaaatcaaatatcctaatgtatgtggagctggaatctcttaggagaggaggtaaaagagggaacaggaaaatattttaatattttaaaaaataatggcttcaaatgttgtatatttaatggaaaccatatgtccacagatccaagaaaatcaaagaaccgcagacgaaagaaacatgaaactatattatattttactgtataatatatatactacctattataatcagattgcttaaaatcaggaataaagagaaaatcttaaaagtaatcagagaataagacattgcatagagaggaaaaaatataaaaatgacagctgacttcttgttagaagaaaaaaataaagcaagccagaagacattggggcaacatctttaaactactaaaagaaaaaaacttctgtcaggcgcggtggctcacgcctgtaatcccagcactttgggaggctgaggaggcggatcacctgaggtcaagggttcgagaccagcctgaccaacatggagaaatcccatctctactaaaaataaaaaattagccaggcgtggtggcgcatgcctgtaatcccggctactcgggaggctgaggcaggagaatcacttgaacccgggaggcggaggttgcagtgagccgaaatggtgcaattgcactccagtctgggcaacaagagcaaaactctgtctgaaaaagaaaaaagaaagaaagaaagaaagaaaacttctaaaaaaaaaaaaaaatgagaggccaagtgtggtggctcaagcctgtaatcccagcactttgggaatccaaggcaggaggattgcttgagcccaggagttggagaccagtctggcgaacatggagaaaccctgtctcaataacacatacaaaaattagccaggtgtggtctagcacacacctgtagtcctagctactggggatgctgagatgggatgatcacttgagcccaggagtttgaggctgcagtgagctgtgatcacactccagcctcgatgaccgtgagaccctgtctcaaaacaaacaaacaaacaaaacagaggatattttttgtcctttggttagggaaagatatttcgagatattttagacactacatcaaaagcatgctccatatgagaaagaacctgataaatgagatttcatcaaaattaaaatcttctactcttcaaaagacactgttaaggaaatgaaaagataattcacaggctgggagaaaatatttgcaaatcacctagatgataaagaacttgtatccggaatatataaacctcccaaaactcaataatgagaaaccaataacccaactttaaaaaatgggcataaaaacctggcaagatggctcaagcctctaagcccagctactcaggaagctgagatgagaggattacttcaggccgggagttccagaccaacctgagcaacatagtgagacctcgtctcttaaaaaaaaaaatgatgggggatgaagggccaggtgtggtggctcacacctgtaattccagcacttttggagatccaggagggcagatcacctgaggtcaggagttcaagaccagcccggccaacagggtgaaaccctgtctctactaaaaatacaaaaattagccaggtgcagcggcaggcacctgtaaccccagctactcgagtggctgagccaaaggcattgatcacttgaggtcaggagttcgagaccagcctgaccaacatggtaagactctatctctactaaaaatagaaaaaaatataaaaattagatgggcatggtggcgcgtgcctgtaatctcagctattcgggagactgaggcaggagaatcgtttgaactcaggaggcagaggttgcagtgagctgagatcgtgccactgcactccagcctgggcgacaaagcaagactctgtctcaaaaaaaaaaaaaaaatatttaacaaaaggaggcaaaagatttaaacagacatttcaccaaagatgatatgtgaatagcaaataagcacatgaaaatacattgaccatcattagtcattagggaaatgcaaattaaaacctcaataagatgcctctgcacacataatagatcatctgaaatgaaattgtattagtgaggatgaggatgtgtaggaactaaaacaatcacacatggcaatttactgtaaaatggtacagtaacttcaataactttggaaaacaggttggccatttctttactttttcttcttcttcctcttcttttttttttttttttttgagacagtctcactctgttgtccaggcgggagtgcactggtgcgaactcagctcacgcagcctcgacctcccaggctcaggcaagagctcagacaatcctctcacctcaacctcctgagtagctgggaccacaggcatgcgccaccacacccggctaattttttttgtatttttagtaaagaccaggatttgctatgttgcctcacaggttcaagcgattcttgagcctcagcctcctgagtagctgcatttacaggtgtgcaccaccacgccaccacacctggccctggctctgcaatttcttaaagagtttaatatgggcaggcacggtagctggtgcctataatcccagcactttgggaggccaaggtggtagggttgcttcagctcaggagttggagaccagcctgggcaacatagtgaaaccctgtctttactaaaaatacaaaaaatcggcagcatgcggtggcaactgcctgtagtcctggctactcaggagactgaggtgggaggatttgcttaaacccgggaagtcaaggctgcagtgagcagagatcacgccatagcactccagcctgggcaacagagagagatcttgtctcaaaaaaaaagaaaaaaaaaaagaaaagatcttaacatagatgttccagatgaaccactttttcaccactacatgtttattcaagaaaaatcaaagcagatgcttacatataaacattgtccacaaatatacatagaagctttttagggggaaaatattaatttttcctgtttatttttaaattgacaaattaacgcatatatatatatatatttatactgtacaacaggatgttttaaaatatgcatacaggccgggcgcggtggctcacgcctgtaatcccagcactttggaaggctgaggcgggcggatcatgaggtcaggagatcaagaccatcctggctaacacagtgaaacaccgtctctactaaaaatataaaaaattagccggacatggtggtgggcgcctgtagtcccagctactccggaggctgaggtaggagaatggcatgaacctgggaggcggagcttgcagtgagccgagatcgtgccactgcactccagcctgggtgacacagcgagattccgtctcaaaaaaataataaataaataaataaataaaatattcatacattgtagaatggttactaaccattaacaaattcattacctcacatacttattatttatttgtggtgatatggtataatatgaaatatatttggtctgtgtgccagttcctgtcaccctgtcacgagaaattcctaaaacccttgtaattttctgagtgataggagtgcattttgaaattcacaatgagccttttttgtgaattattttattttaattttttatttcaataggtttttgggaaacaagtggtgttagctatctttttttattattattatactttaagttctgggatacatgtgcagaacgggcaggtttgttacataggtatacacatgccatggtggtttgctgcacccatcaaccagccatctacattaggtatttctcctaatgctatccctcccctagccccccacccgccgacaggccccagtgtgtgatgttcccctccctgtgtccatgtgttctcactgttcaactcccacttataagtgagaacatgcagtgtttggttttctgctcctgtgttagtttgctgagaaggatggtttccagcttcatccatgtccctgcaaaggacatgaactcatccttttttatggctacacagtattccatggtatgtatatgccacgttttctttatccagtctctcactgatgcgcattttgttttgttttgttttgagatggagtctcgctctgtcacccaggctggagtgtagtggcatgatctcagctcactgcaacctccgcctcctgggttcaagtgattctcctgcctcagcctcctgagtagctgggactacaggggcatgccaccacacctggctaattttttgtatttttagtagagacggggtctcaccatgttggccaggctgatctcgaactcctgacctcagacgatccattcacctcagtctcccaaagtgctgggactacaggtgtgagccactgtgctccgtctcttttttttttttcttttgagacagagtctagctctgttgcccaggctggagtgcagtggtgccatctcggctcactgcaacctccacttcctgggttcaagcgattctcccacctcagccttaggctggcctctaactcctgagctcaaagtgctgggactacaggtgtgagccaccttgcccgccaagccccttttgaccacacttgagtttacaataatgaggtgggtcagggtggggcccctagatagcctcaggatagggctggccaccagaaagaccaagtgattagaggattgtaactttcagctccactgactgacgtctgggaagaggtgggtgaggttggagactaggccttataaaaactcttatttttatttcttgttgttgttgttttgagacagccttgctctgttgcccaggttggagtgcaatggcgtgatctcggctcactgcaacctctgcttcctgggttcaagcgattctcctgcttcaaccttccgagtagctggaattacaggtatccgccatcatacccagctaatttttgtgtttttgtagagacagggtttcaccatgttatgcaggccggtcttgaactcctgaactcaggtgattcgcccgcctcagcctcccaaagtgctgggattgcaggcatgagccaccacgcccggccatgtttttaaattaataaaaattttagggacccagtacagtgactcacgcctgtaatcccagcaagttgggaggatgaggtgggtggatcacttgaggtcaggagtttgagaccagcctagccaacatggtgaaactttgtctctattaaaaatacaaaaattacccaggcgtagtggtgcctgcctgtcatcccagctactaaggaggctgaggaagaattgcttgaacccgggaggcagaagttgcagtgagctgagatcgcgccattgcattccagtttgggcaacagagcaagactccatctcaaaaaaaaaaaaatttttttttaaattaaaataaaggggttttttgtagagatgggggtctcagtatatgcccaggctggtcttgaactcctgtgctcaagtgatcctcctacatgagcctctcaaagtgttcgggttacaggcatgagccaccgctcctggccaaagcctcataaaacctgttgaacaacacttgatgggcccggtgcggtggctcacacctgtaatcccagctcacacctgtaattccagcactatgggaggttaaggtgggaggatcacctgaggtcaagagttagagaccagcctggccaacatggtgaaatcccgtctctaataaaaatacaaaaattagctcgtcgtggtggtgcacctctgcaatccctgctacttgggaggctgaggcaggagaatcgcttgaaccccggaggcagaggttgcagtgagccgagattgcaccactgcactccagcctgggcaacagagtgagactccatctcaaagaaaaaaaaaaaaagccgggcacggtggctcatgcctgtaatcccagcactttgggaggccgaggcaggtggaatgcttgaggtcaggagttcaagaccagtctgaccaacatggtgaaaccccgtctctactaaaagtacaaaaattagctgggcgtggtagtgggtgcctgtaatcccagctactctggaggctgaggcaggagaatcgcttgaacctgggaggtgcaggttgcagtaagcggagatcgtgccattgcactccagcctgggcgacagagtgagactccgtctcacaaaaacaagcaaaaaaactaaaaaaaaaaaaaaaaaaaaaaaaaagacttgatgagctgagtaaaagcctccatggccaggagagtggcacacttcatctccatgaagacagaagctcctatgttgatgacctaccctttcagacctccccccacgtacttcatctggtggttcatctgtgtcctatttatttattcatttattttttgttgatacaaatttgatgtacatattttggacggtacatgtgataatttgatacattcatataatcaaatcagggtaattggaatatccatcacctgaaatatttatcttttctttatgttggaatattcaaattattttttctagctaatttggaatgcaccatcaattaatgataactataatcatcctactgatctattgaacagtaagtggtcttacttcttgtatcaaaatatatttgtactcattaatcaacctctcttcatcactcccttcctcccatctgtgtcttttttttttttttttttttgagacggagttttgctcttgttgcccaggctggagtgcaatggcgcaatctcggctcaccgaaacctctgcctcccaggttcaagcaattctcctgactcagcctcccaagtagctggagttacaggcatgtaccactatgcctggctaattttgtatttttagtagatacagggtttctccatgttggtcaggctggtctcgaactccagacctcaggtgatctgcccgcctcggcctcccaaagtgctgggattacaggggtgagccaccgcgtctgggcatctgtgtcttatataatgtcttttttgtttgtttgtttgagacagagtctcgctccgttcccaggctggagtgcagtggtgcaatcttggctcactgcaacctctgcctcctgggttcaagtgattctcatgcctcaacctcccaagtagcggcctgccaccatgcccagctaattttttttttttttgagatagagtctcactctgtctggcccaggctggagcacagtggtgcgaatctcggctcactgcagttttcgcctcctgggttcaaacgattctcctatctcagcctcctgagtagctgggactacaggcgtctgccaccacacccagctaattttgtatttttagtagagatggagttcaccattgttggccaggctggtctcgaactcctcaggtgatccacccgcctcggcctcccaaagtgctgggattacaggcacgagccactgagcctgacctatttttttttttaatttttattttttgagacggagtctcgctctgtcacccaggctggaatgcagtggtgcgatctcggctcactgcaagctctgcctcctgggttcacgccattctcctgcctcagcctcccaagtagctgggactacaggcgcccaccaccacgcccagctaattttttgtattttgtatagtagagatggggtttcaccatgttagccaggctggtctcgatctcctgacctcagatgatcctcctgcctcagcctcccaaagtgctgggattacacacgtgagccactgctcctagcctgctctataatttataacagcacaagactagaaacaacccaaatgtccattaataaggaactggttaaatagagtacatccacactatgcagctgtaaaatagaaaatgcagctgtgaatgtgagaaaaaaaactttatatgctgccatagagtggtgtctagaatatgctgctaagtgagagaaaagaaagaagaaaatgcaaagcaatgaatagagtattgtatattatttgttatctaagaaagtatttcctagctctatccattgaaaaacactagaaaaacaaccaatgcaatagcaatgagtgcttttcataaccagaatgtggtctctaatgccactttccactgaaaggaaccagagtccttaaagaaatggcttaatctatgttggggcagaaaatgtacaaggtgaacctggaattattattttttaattgaaagcaagtttattaggaaagtaaaggaataaagaatggctattccataggctgagcagcctgaacctgaaatttttattttattttattagagatgaggttaggccgggcacggtggctcatgcctgtaatcctagcattttgggaggccaaggcaggcagatcatgaggtcaggagtttgagaccagcctggccaacgtggcaaaacccccgtctctactaaaaatacaaaaaaattagctaggagtgctggcaggagcctgtaatcccggctacttgggaggctgaggcaagagaatctcttgaacccggaagtcggaggttgcagtgagccgagtttgtgccactgcgctccagtcttgggcgacagagcaggactctgtctcaaaaaaaaataaagggagatgaggtcttgttatgttgccccggctggtctcgtacccctgcccttaagggatcctccttcctgagtcacctagctgggattataggcacaatccaccaagctccgtctgaaccaggaatattttatcataccagaatgtaagaaagctgtcagatattgctggaattatttcacaaaaacatcaatgccaaattgaaagagttctcattgccacaatgaaccatttgagtaccaaaaaatcattattaaaacaaattgaaacattagctgtagtaaaactcatgtgcaggtaaagatactaaaaaaaattagtcacctttggagacacttgggattccaccttattctgaaaacaaggaaataaagggaaagactcaatcattttcctgcttttcttatacaaattatttctatttatttattttttgagacagtgtctttctctgttgcccaagctggagtgcagtggcttgatcacggtttaccacagcctcgacctccctgtctcaagtgatcctcccacctcagcttcctgagtagcagggaccatatgtgtgagccaccacactcaacgaattttaaaattttttgtagagatggggtctccctgttgcccagggtggtacaaattatttttggccaggcatggtggctcacacctgtaatcccagcacttggggaggctgaggtgggtgggttgcttgagctcaggagttcaagaccagcctgagcaacatggtgaaatcgtctctaccaaaaatacaaaaaattagctgggcatagtggcctttgcctgcagtcccagctacttagtaggctgagatgggaggatcacttgaacctgggaggcggaagtgagccgagatcaccccactgcactccaggctgggtgacagagtgagaccccatcttagaaagaaaattattattattattttttgagacggagttttcacttttgttgcccaggctggagggcaatggtgcaatcttggctcaatgcaacctccgcctcccaggttcaagcaattctcctgcctcagcctcccaagtagctggaattacagacatatgccaccacactcagctattttttttttttaatttagtagaaacagggtttcatcatgttggtcagactgttttcaaactcctgacctcaggtgatccacctgccttggcctcccaaaatgctgggattacaggtgtgatccactgcacctggccgaaaacgattttttagggtaatcaaataattgatcaagaaacattctcctttacagaagattacagactgagattacaggcatgccaccacgcctggctaattttgtatttttagtagagacgggatttctccatgttggtcaggttggtgttgaactcccgacctcaggtgatgcgccctcctcggcttcccaaagtgctgggattacaggcgtgagtcaccacacccggccaggaacatgttaaatgacaacatgactcaaggtaatgtgtagaccttgttttgatccttattcaagcaaatcaactgtaagagacaggggtatttgaactgggtaattcatactattagaaataaatatatctattttgagatggagtctcactctgtcacccaggctggagtgcactggctcaatctcagctcactgcaacctccatttcctgggttcaagtgattttcctgcctcagctttccaagtagggagagacagctttagtaaatatctttgtacctatataattattaatgtctgaaagtagttttgtagagtattctaagaaatggatttgcacagtaagtagagcaggcacttacaaatatatatacagtacatataaatgcttcttttcttttttcttttttttggttggttggttggtttttttagagacaggctctcactctgtcacccaggctagagagtagtggtgtgaacatgactcacagcagccttgactttccaggcttaagatcttcccacctacctcagcctcctgagtaggtggaactacaggcatgtgctaccacacccggctaattttttctgtttgtttgtagaaacagggtctcactatgttgcccaggctggtcttcaactccaacccctcctgcttcagcctcccaaagtgctgggattacaggcatgagccattgcacctggcattcactgtttacgtaagcagggtcgtattatatatatattgttctccaactttgcttttttacttcatgtggcatagctatctttccaggatataatatataggggaccactgtattctttttagaagttgcacagtattccacaggataaactgatataccattttttaaatacaagttttattttaatcttcattttttaacacattttatcatggaaattttcaaacaagaacaaaaatagaaggaatcctatgatgaacaaccatatacccatcacccagttttaacaattatcatcatgtagtcaatcttatttcatatataccttcccactctcctttctcctccccttttgctggattgtttttttttaaagtctcagataaggccgggcgccatggctcacgcatgtaagtccagcactttgagaggctgaggcgggtggatcacttcaggtcaggagttcgagtccagcctggccaacatggtgaaaccccatctctactaaaaatacaaaaattagctaggcgtggtggggggcgcctgtaatcccagctacttgggaggctgaggcaggacaatcacttgaacccaggaggcaaaggtcacagtgagccaagatcataacactgcactccagcctgtatgacagagcgggacttcggtttcaaaaaaaaaaaaaattaaaataaaaaataaaacagtggccgggtgtggtgactcacgcctgtaatcccagcactttgggaggccaacatggcgaaaccctgtttctactaaatatacaacaattagctggacgcggtggcaggcacctgtaatcccagctacttgggaggctgaggcacgagaattgctggaactcaagaggcagaactcgtgagtcagagatcttgccactgcactgcagcctgggcaagagagcgagaccccgtttaaaaaaaaaaaaaatgctggctgggtgcggtggctcacgcctgaaatcccagcactttggaaggcagagacaggcggatcacccgaggtcaggagtttgagcccagcctggagaacacagcgaaaccccatccctcctaaaatacaaaaattagtcgggcgtggtggcatgcacctgtagtcctcgctactcgggagcccgggaggcggaggttgcatccagcggagatcacgccactgcactccagcctggacaacacagcgagactctgtctccacacacacacaaaaaaaggcataacaaatttaagtgactcaaagctttatgtgacacaggagctctcagaaaggaacagttaaattataacatgtccatattatgcgttagtatgtgtccacaactaacccataatatggacatgttataatttaactgttcattcctctcttgatagacactgaaatcgtctctataattttcctgtaagaaataatgccttggggtgggggtgtcttcctttctgaggctatcatttgtattcctcacttcttaaatttgtttgatatgttgaggcttaaaaaaaaaagattacgggtcttcagaacgccccaatgcccgcggggtgctggggtgcctcggagtttgtcaaggtgtagcttaaaacgttaattcccatgctcgctcccaaatattcgaattaaggcttctgtagttcttacaagtcacccgctttctttcaggaggaatgttaaagattaagagcggcaagaagtcagagtcggcccaccctccgagctctcttagggcgatgtccttgctaatttggagactgattcagtccccttttggcccccaagttacgtaaagataaggactttggagatgttttctcaggaaggacagagctgaaaaacaaagttccgtaagtctggccggtaactacatctttccttcctaacaaagaataagccgcaattcactctctctggcacctgaactttggggtaacgattaactgcgatccgaagccttcaggcaagtaaaaaattcctgaagtgattacgcctgtttggaggcttgcagggcactaggggatggggaaaggtgaatcgaggtgctctctggctcattcgcagccggctaacccgccatatcttacacagctaagggctgccgacgccattttgcagggtgggctgcgcagactcttggcgggaggccggcgcgcttgagcgggagaggacgtggaagggttggaggtggggagtgcgcgttacgactggaaagcacgcgtgcgcacaggcgacagcagcggaggggtggggccagtgtacgagtgcgcgtgctcggtgggagcccgcggagtacctggaaggaggtgggggcgaggtagaaaggagtggggttgaaaagcgcttgcgcaggacggctacggtacgggggtgggagggcttcggagcacgcgcgcggaggcgggacttgggaagcgctcgcgagatcttcagggtctatatataagcgcggggagcctgcgtcctttccctggtgtgattccgtcctgcgcggttgttctctggagcagcgttcttttatctccgtccgccttctctcctacctaagtgcgtgccgccacccgatggaagattcgatggacatggacatgagccccctgaggccccagaactatcttttcggtaactgctggggggagctggagcgaggccgagcggggcctggtggcggtgagggtgggggtgaggggcgggaatccggctgcaaccgggtctggtggagaccgccagaccgacgggaggcctgagcgggtgggaagagctgcctgagccctggacctggagggattggagccgcggggggagccggtggcgtgaagggggaggagacgagcggcctgaagcgtctggggcgtgagcggtccgaggcccggggcctgaggtaaagtggaaccggccgcctggaagttcggcctttgccggggatacgtggcggagctccaggcgtggtttattttctaacggcggtggttcataggcttctgatgccaggccccgggttggtggtcctggaggctgggttcaccgggaagcatgggcctgcttgttggagcgggtagatgcacagcctggcgttattctggcctcagagcctggagctgccggacgtagacttacctcgcgtgcttcggccagttactgggggtggggaggcgcggcgcggcgtgaggaggccgcaaccgctgggagcacgtggttgccacgtggttgggggagggaggggggtgtgggcgctacatccgggactcaccggcgtgttgccactcgtgagccagggatgctgtggctctgttgaagtgggaaatgttaagaggctggtagcactagggttctggaggtctttgttcagtgcttacagcatgtactgtgatggcagctctcatttttttgagccccttttctgtctcactgcggtaggtggagctagccccactttgcagatgaggatactggtgcccagagataaactcacttaacgaaggttgtacttagtaaaggcaataagagactaaatctaaaccaagacgcttgactccgtagctgctgcttcgtgaatattaatgaggcttcgttttagggggacgtcctcgcatgccgccatttgtgcggcattgaccaaactgcttttctaaatacaagaaacacgtagagtgttcggtttgagtcagatcaagacctaagactattcgcagaattttgggagcaccacccccctcgacttgcggtagtcctgccccaaaaaggagagtcccacttgggtttttgatctcagtaggattaattgcagaagcctaatctttgtactattcagactttgaagtaaatgcaaatcctaccgtgaattttatcttgttcattatccgtgctgagatttgttaattaaacgtctgttcacatttaagcatgtatatgtattggtaacggttagatgatagttaaatggaatcatttaaaatttttattctgacagtgttttgaagaattttgcccattcatggagtgagagtagacatatgtattcaaaacattaaggctttaattcctagttattttggatagctgagaattctggtaaatttatatcagtactttttgataactatcggaaagaaccctccttgtcttaaacataatttctgaatatagtttgaggcgtatgtcactttctgttgctttaaagagtggagtgttgatccctgtagcaaacttcggttcttttacttttgtcatttttcttttgtaatagtaagctattcatgtttgtaaccgttctcatttcgaaattgccatttgggaatttaggtaggtaaatcagctgttttaaatagtgggaaacttaacattggacattacatttggtttcagataattgcttcaggttgagatttactaaaccattgagcttgtttatgcagaataacagtacctatcagcgtagttagagatgaaatatggtatgatgagagaatggaattatagtcttttatgggtgtctgtagaggtttctgttcaagaaatctaggaattgatcattctgctttgccctctggtagctaaaatagtgaaaaactagttcaaaagttagacctgacctttttggttacccacacttaagtttcagtgttatttttctccttgttagagttgcttttttcttcatttacaggttgtgaactaaaggccgacaaagattatcactttaaggtggataatgatgaaaatgagcaccagttatctttaagaacggtacttaaactttcaaaataaactacttaaccctacttgatttcagccttttagtttctattcatgtggcttgagactttttttcctttgctgactgcttataaaatactatttcttacacctgggtattgtgtgtacctcactgtctgtacatctttgaagaacttggcatctataccactcatttggtaaccatgtaaattccagtcacactgttcaacttgccttattttcttcagttgaattacaaagcccttgtaaaaggcatcgataatctttcatgtctaccagagactagccttctgctcaacttagaagttgctcaataaatatgttaggtggtctatattgtgtgtatgcatatttatgcatttcttaaattttctgaatatgagaaactgatttgccaagatcacaaaacctgaggacaacattgcacaaatttgttttccagggtaatagtgagaggtttatacttgttttttaaaaaaatcacagtcatgtgcctcattgcaactgctgggtcaacagatggatcgcatatacaatggtggtcccataagattattataccttatttttaatatacctttcctgtttttttttttctttggaggcagtctcgctctgtcacccaggctggagtgcagtggtgtaatctcggctcactgcaacctctgatttccgagttcaagtaattccctgcctcaccctcccgagtagctgggattacaggcatgtgccaccacacctggctaatttttgtgtttttagtagagacgaggttgttaccatgttgtccaggctggtctcaaactcctgacctcatgatctgcccgcctcagcctccctaagtgttgggattacaggcatgagccaccaagcccggccctttcctatgcttagatgcacaaatactgtgtttcggttgcttacagtattcagtacagtaacactgtacaggtttgtagcctaggtgtgtgtagtaggctataccatctaggtttgtataagcacattcttatgattgtacaaagatgaaattgtctaacaacacatttctcagaacctagccctgtggttaagtgacgcatggctgcatataacatttagtgggggggtgtaaaataggtggaactcaaaagttgaagtagtattttttttttgttcacaggtcagtttaggggctggtgcaaaggatgagttgcacattgttgaagcagaggcaatgaattacgaaggcagtccaattaaagtaacactggcaactttgaaaatgtctgtacagccaacggtaagggcacttacatactttggatgttgtgtcaaggtttaattctgttttaaggtaggtttggtgtcatttagttgtgccaaggagatagaaagtggttctttatcttctgtcactggagttcgatggtcaactcttgaacatgggggcttctgctgctacttttatcagaggtggaaaaacaggttcactggtttgttgatttggcttatgtgtttgcctgtaatgtttattgttcattttcttcacatgtttagtgatgaaaaatttctcccttctaggtttcccttgggggctttgaaataacaccaccagtggtcttaaggttgaagtgtggttcagggccagtgcatattagtggacagcacttagtaggtatgttatttttatatattatactacttagtttgtcctctttagtgcagttgcttggttcccagtttggacttaaagcatgggtatagtactactgtctttttaataggttccaatgtgagtctagaaattggagaggacaaataaatttttggggcgggggggagaggaaatcttgctgtcacccaggctagagtacagtggcacgatcttggctcactggaacctctccgggattcaagcgatcctcctgtctcagcctccccagtagctggggccacagacgtgcaccaccaagtccagttgcgtttcatagttatagtagagaaggggtttcgtgatgttggccaggccgatcttgaactcctggccttaacgtgatctgcacgccctggcctctcaaagtgctagtattacacgtgtcagccactgtgcctggcctaaaaattattttttaataaagacagtctcattataacggctggagtgcagtgatgtgatcatagcttgctatatcctcgaactgctactgggttcacctcagcctctggaatagctagaactacaggcacactccacgcctggctaattttttttgtatatgtgcagatggggtctcagtatgttgcccagattggactcttggcctcaagtggtccgccttggcctccccaaagtgagattacaggcatgagccaccctccccaggcttcttgcatttaaaacctggcagtgaacattaggcctcaaaatacttttgttaaaaagttccttttcccatgtgctctttttttttttttttttaaatagaatagaagtctcagtttttagagtatttactatcagtgttctttttttttctgacttcttgctgcttgagttttataatgtctaataaattgtattttagctgtggaggaagatgcagagtcagaagatgaagaggaggaggatgtgaaactcttaagtatatctggaaagcggtctgcccctggaggtggtagcaaggttccacaggtagagatggcaattttattataggttttgtattatagcttttagtttggtgatagaacagctcttgttcatgagtacgtatcttttcttttaaaagaaaaaagtaaaacttgctgctgatgaagatgatgacgatgatgatgaagaggatgatgatgaagagtaagtatgattttagaaacttgatatacttccggaatcttgacaaaaaaaggaatttgacatagttatatgcatgagggttttataaaagtcatttacaaaaagccatcctatgtaatagtttataataaaagggcaggtggtcatctgttgtcagtttaagttaaatgagctgagttgaaaggatattgggtctgtgagcctttacaatgctgtgacttgtgactcttcagaagggtagactatagtgtttgtgaagtttgattatgtccctttgttctgaagatttagtggatgtgttatacccatcaagcctggtatgttttatggtgagcagttaatgagattgggttgaaagaaaatatgattaaatagctctatattcattttacaagttgttactcaaggtttgttattccctaaaaggattttgtcttatggttttatgtagatatttattgacaaaaataagattctaaaagggatattaagattttcttgggatttaaaatatggttggaaacaatatttgatgactttatattaaactagatcaaactattgttacaaacagttaatacgcacactggtataaagtactgtttataattggtcttatgtgtgccagtaccagtaatgcattgaatactttgatttggctctcagctttgtccttcagttctgaggttggtccatatgcatttattgaaaacaaatataagaacatgcactttaaaagagaacctgcatgaaagatcaaattgggagtttaggttttaagctggtggttcttcaaaatctttgagcatgacgatgaaggcagaaaacaggaaaaaggccgaaagagccgaaagcttaaaaattcaaagtatgaccaggcgcagtggttcacacccgtaatcctaacacccagccaagatgagaggatctcttgaggccagcccggtcaaaatagcaagacccaatctcaaaagaaaaataaaaattcaaagtacttgcatgtcaaacttataaatgaacgcaaacttaaaggtagtatttgactgttgctgtttttgttttctttttttttttttttttttttgagatggagtctccagttgctcaggctggagtgcggtggcgccatctcggctcaccacaacctctgcctcctgggttcaagcgattgtcctgcctcagcctcccgggtagctgggactgcaggctcggggcaccatgccctgctaatttttgtatttagtagagacagggtttcagtatgttggtccggctggtcttgaactcctaacctcgtgatctacctgcctcggtctcccaaagtgctgggattgcagatgtgaaccactgcgcccagccaaatttttgtatttttaatagacatggggtttcaccacgttggctaggctattctcaaactcctaacctcgggcgatctggtcacctcatcctcccaaagtgctgggattacaggcatgagccaccgtgcccggccactttttttcttgagatggtgttttaccatgctactcagactggacttgaatctctgggcacaagctatcctcccctctcagactatgaagcaggtggggttacaggagcataaccaagcccagcttgtttggttatcacttttaagaatatttctcgttagtaagaattgaaatacattccaagagaagaatgggaaacaggctaaaaacacaaattagaaatagggatggtatggttcggattggtttagtctgattttgagttacctttgtacaagtttataaaataagtgtttaatagcattcaccgaggctcggggacaagcaatcccttccagaaaggctttggagtaggacctgattgtagtattgaccctgttggggctttggaagatttccttttttaaaaattgatataattaggccaggcatggtggctcacgcctgtaatcccagcactttgggaggctgaggtgggtggatcacttgaggtcaggagttcaagaccagcctggccaacatggtgaaacccggtatctactaaaaatacaaaaattagctgggtatcgtggtgcctgcctattggtcccagttacttaggaggttgagtcaggagaattgcttgaacctgggaggtggaggttgcagcaagccaagaatgcgccaccgtgttccatcctgggcaacagagggagactcccatctcagaaaaatgggtataaattcatgatgtaaccacaatgtaattttgtttgtctttaagttgggcattgataggaatgaaaagtgtagatatcaaggtccaaatcagtacctggttttttttgtgggattttttttttttcggcaagtctcgctcttgtgccccaggctggtgtgcaatggtatgatctctgctcgctgcaacctctgccttccaggttcaagtgattctcctgcctcggcctccagagtagcttggattacaggcacttgccaccacgcctggctaagttttgtatttttagtagagacggggtttcaccatgttggccaagctggtctcgaactccaaagtgctgggattacaggcgtgagccaccatgcaccgccgcaagttttcatataagttgaagaaagtgtactaaggtctgcatagtagtaaaggatgccttgagggaaacaaatattaatagaaacttcagtggtgagatggcaagggcccagcatagatagatggcaatgaaaatgcaaagaggtgcatgaaggttcgttatagttacttagaaatctaaccttttgaacacagatcaaaggggaatttggttcctttttgaggatggaatgggtatatggtgtgggctcagatgactcttgatttaagcaagaaaggctatgtaatgtgcatagtgctgatgtatactatacatagatgtatgtaatacgttgatagtatgtggcccttaaatgtcttttttaatttttggggaatttcttaagtaaagctgaatttttttttttttttttggagacagtctctgttgccccggctgaagtgcattgttggctaggctggagtgcagtggtgcaatcatggctcactgtaacttctgcctcccgggttcaagtgattctcctgcctcagcctcccaagtagctgggattacaggcatgtgccagcatgccaggctaattttttgtatttttaatagagatggggtttcgccatgttggtcaggctagtcttgaactcctgacctcaggtgatctgcccaccccagcctcccagagtgctgagattacaggtgtgagccaccacaccctgccagtaaagctgttttgatagtagttttgatagctattttgatagtagtttaatagacttgttttaacaaataagaaaaaatgtttaaaaaaagcattctcatcttgtttctagcacaggggaggcacctgcagggattgggttctaatgccagaaacttgtactgacaaaatcactgttaaaaagccacttgaagggctatttgtgacagctttttaagttatgatactttttctaaatacagcaaatatttcttcggtattggaaagataggtgtttcttacatgaagttgctgtattgggatttagagaccagtacgttcagttgttgaattaaacgtgaaccccttggtatttgctaatagagacttctgcctgacttgccctccagtgactcgatttgattactcccctccattgtttacctattaacagttcacacctgtaatcccagcactttgggtggtcgatgcgggcagatcacctgaggtcaggagttgaagaccagcctggccaatatggtgaaaccccgtctctgctaacatacagctgggtgtgatggtgggcgcttgcaatcccagctgctggggaggctgaggcaggagaattgcttgaacccgggaggcggaggttgcagtgagccgagatcgcaccattgcattccagattgggcaacaagagtaaaactcaaaaaaaaatagtgtgcagttcagtggttttagtatgcatagttgtgtagccatcaccataatcaattttagaacatttcatcacctcaatgagaaatcgtactctataggtattacccctcatgctcttcagctctagtcaaccacgaatgaactttgtctataggtttcctgtccctcatattttgcacgaatggacttctgtgactgttttcttagcacagtgttttcaagtttcatccatgttatagcattatcagtactccatttatttatatggttgaatacattgtatgggtatgtttggttattcatcagttggtgagcatttgagttgcttctacttgttgactgctatgaacgcttgtagacatgtcattttacttggatgtacacctaaagcagagtggctcacccattgtattcccactagcagtgtatggggcttctgatttcactccaacctactgatttcactacaccctcacttgccattatctgactctaatcctggtggtatgaagtgctgattgtgggtttgattgcgtctccctgtggactaataatgagcatcttttcatgtattcattggccatatatctttggagaaatgtttttgcccacttaaatccatttacttctctttgtctttactaagttgtaagaattcttttttcttttttctttttgatatgatttttgtatttttagtagagaaggggttttgccatgttggccaggctgttcttaaactcctgtcttcagtgatccacctccctctgcctcccaaactgctgagattacagctgtgagccactgtgcctggcaagaattcttttttttttttttttgacaagtctctgttgcccaggcttgagtgcagtgatgtgatcttggctcactgcaacctcctcctcccttgttcaagcaattcttctgcctctcccaagtagttgggattacaggcaccccccccaccacgcccggctaattttctgtattttaaatagagaccgggtttcgccatgttggccaggctggtcttgaactcctgaggtcaggcccgcctcggcctcccacaagtgctgggattacaggcgtgagccactgcactgggcccaagaattctttatgtattctgcaaacaagtcccttatcagacacaagatttacagattatcttccaccattccgtgaattgttacttaactttcatgatggtggcctttgaacaagtttttaatttttatgacgtccgatttcttttgttgcttgtgcctttggtgtcaatcctaagaaatcattgctaaattcaaagttgtgaaaatttgcccccttaattctgagttttgtcctttatatttagggctttgttccattttgagtaaacttatgtgtatggtgtgaatggaggggtctaaatatagactttggatgtagattagcagttgccccaacatgatttgttcaaaaactattttttccccattgaatgatcttggcaacctttaaaagagtcacttatggctgggtgtggtggctcacacctgtaatcccggcactttgagaggctgaggcaggcggatcatgaccaggagattgagactatcctggccaatttggtgaaaccctgtctctactaaaaatacaaattttagctgggcatggtagcgtgtgcctgtagtcccagctactcaggaggctgaggctggagaattcgcttgaacctgggaggcagaggttgcagtgatctgagattgcaccactgcactccagcctggcgacagagcgagactccgcctcaaaaaacaaaaaaatcactgtttctggactgttctgttgatgtgtctatccttaacatgtaagaacagtacaacactgttcctctgtggtttttatttatttatttttttgaaatgagtctcactgtcacccaggctgtagcacagtggcgtgatcttggctcactgcaacctccgcctcctggttcctcctgcttcagcttcctgagtagctgggattacaggcgcccgccaccatgcccggctaatttttgtatttttagtagagactgggtttccccattagccaggctggtctcaaactcctgacctcaggtgatctggccgtctcggcctcctaaaaagtgccgggattacaagcgtgagccacggtgccttggcccctttgtaggtcttatagctgattttttgaaatcaagtgtgagttttctagctttcttcctttccagattgcatttggcctctttgggtcccttaagtgtcttttttgtttttgttttttgagatagggtcttgctctgtcacccaggctggagtgcagtggcagaattacacagttacagttcactgtctcaagcagatcctcctgccttagcttttcaaatagctaggactacaggcgcacaccaccacgcctgctaattaaaaattttttttgtagagagggttctcattatgttgcctaggctggtcttgaactaaaacgatcctcccacctcagcctcccaaagtgttaggattataggtgtgagacactgtgccagttcttgggtttgtttataaattttaggatctgtttctacagagaaaccagcttggggagtcttctaacgattgtatttaacctgtatattcggggagtgtttccatcttggcaatatctgaacatggaatgtttctatttaggtctttaatttttttttttaacacaaattcactctgagtgtacagtttaatagaactatacattacttaaatatacatacattatacagtggtatagtgtgtatttatgcaaaactactcattgagcaacttcatttcccagcccctagcgatcacaattataccttctatttctttgagtttgactacttttagatacttaatgaatagaatcatacagtgtttgttcttttgtggctggcttatttcactttgttcaaggttcagtcatgtagcatgcaagaggattttcattgtgtgtacatatacattttcatttagtcatttaacacttgggttgctttcacctcttggctgttgtgaacaatgcttcgataaacatgggtgcacaaataatcacttcaaggtcctgctttcaattcttgtgtctactcccaaattttgaaagtgcttaatgtcttgacatttcatttgtagtgatgatgatgatgattttgatgatgaggaagctgaagaaaaagcgccagtgaagaaagtgagtagatacaatgctacaaggttgttaaactaacaatagaaatggtgattttttagtgctatttgcttgttttgtagttaagggaagctggtgtgggagatcatctcatactgaaaattagtcctgaggaggattacagaaaacttaagagtggggaatggtctgttttctttatccatgtggccctccacccagtttgttagtcttgtgtaaccttttgtccaagtggttgctgctttttccttccttttttttttttttttgagacggagtctcaatgtcacccgggctggagtacagtggcgcgatctcagctcactgcaacttctgcctcccgggttgaagcgattctcctgcctcagcctcctgagtagctggaattacagactcatgccaccacacccagctaatttttgcatttttagtagaccaccatgtcggccaggctggtctcgaactcctgacctcgtgatccacctgcctcggcctcccaaagtcctgggattacaggcatgagccaccacgccaagcctgtggttgctgcttgtcttacatggcttggacagctttgtttgcactgttgttggggtcagggacagtgattaagataaatttctaattgcagtctatacgagatactccagccaaaaatgcacaaaagtcaaatcagaatggaaaagactcaaaaccatcatcaacaccaagatcaaaagtaagtggctacatttacacgtgggtctcattgatctagttggggaaaaagattctactgtggaagaatctagtgtgtctgaaatttgataggcctttatagaacccctgtaattgctgtttaaaagttaaaatcagcttgctgcagccaggctcagtggctcactcctgtaatcccagcactttgggagggaggccaaggtgggtgggatcacctgaggtcaggagtttgagactagcccggccaacatcgtgaaaccctgtctttactaaaaacacaaaaattagccaggcatggtggtatgtgcctgtaattccacctactcaggaggtggagacaggagaattgcttgaacctgggaggtggagtgcagtgagattgcaccactgcactccagcttgggcaaaagagcgagactccgcctccaaaaaaaaaaatcagcttgttgtgtgttgtaggtacacacacacacacaaacatactaaatgtaaggtggtggggcggggggagccaatagacttttttgaaagagatggaccctcactttgtcactcagtctgggttagagttgcgtgatctcggcttactgcaaccttcacttcccgggttcaagcgattctcctgcctcagcttcccaagtagctgggactacatgcgcgtgccaccaggcccagcgtatttttgtatttttgagtagagatggggtttcactctatatgttggccaggctggtctcaaacccctgactgcaggtgatccgccctcctgggcctctcaaagtgtgtgagccaccacgcctggcctgaattttttgtgattgtgaagtcaatagttgtttcctgtaaggaatctttgttgaaaggtatgtctgcatagagtagaagttctcaaccttggctgcatgttagcttgaagtagaacatttgggcctagacagggtgtattgatctcattcctgaccctacccacttccctgcagaaaatggaatttaaaggaaaaaaagtttaaaggaaccccagtacttgtgctctacttatggagattgtcataaaaatggtctggggtgggcgccaggcatcagactacagtgactttcttgctttattcttagggattttctgatttccttttttttttttttttaacctgatgaaatagtttatttacaatttaaacgaataaatttcatattctacaacacatataatctattgactaaatgtaactaatgatgaacctccatacaaacaaccccactaaaaagtgggcaaaggacataaacagacacttttcaaaagacatacaagtggccaaaaagcatatgaaaaacagctcaatatcactgattagagaaatgcaaatcgaaaccacaatgagataccatctcacaccagtcagaatagctattattaaaaactcaaaaaacaacagctgctggcaaggttgcagaaaaaagggaatgcttacacactcttggtgggagtgtaaattagttcaaccattgtggaaagcagagtggcgattcctcaaagagctaaaaacagaactaccatttgacccagcaatcccattacattcccaaaggaatataaatcattctaccataaagatacatgcacacaaatattcactgcagcactattcacaatagcaaagacatggaatcaacctaatacctgatatggtctggctttgtgtccccacccacatctcatctcaaattgtaatccccacgtgttggaagaggggcctggtgggaggtaattggatcatggggtagatttccctcttgctgttctgttgatagtgaattctcatgagatctggttgtttgaaagtgtgtagcacctccccctttgtgctctctctcttctgctgccatgtaagatgtgccttgcttcccctttgccttctgccatgattgtaaatttcctgtggcctcctagccatgcttcctatacagcctacagcactgtaagtcaattaaacctcttttcttcataaattacccaatctcaggtagttcttttttttttttttcattttatttatttatttatttattttttatttttattttttttttaatttatttttttattgataattcttgggtgtttctcacagagggggatttggcagggtcatgggacaatagtggagggaaggtcagcagataaacaagtgaacaaaggtctctggttttcctaggcagaggaccctgcggccttccgcagtgtttgtgtacctgattacttgagattagggattggtgatgactcttaacgagcatgctgccttcaagcatctgtttaacaaagcacatcttgcaccgcccttaatccatttaaccctgagtggacacagcacatgtttcagagagcacagggttgggggtaaggtcacagatcaacaggatcccaaggcagaggaatttttcttagtgcagaacaaaatgaaaagtctcccatgtctacttctttctacacagacacggcaaccatccgatttctcaatcttttccccacctttcctgcctttctattccacaaagctgccatcgtcatcctggcccgttctcaatgagctgttgggcacacctcccagacggggtggtggccgggcagaggggctcctcacttcccagtaggggcggctgggcagaggcgcccctcacctcccggacggggcggctggccgggcaggggggctgaccccccccacctccctcccggacggggcggctggccaggcggggggctgacccccccacctccctcccggacagggcggccggccgggcggggggctgacccccccacctccctcccggacggggcggctggccgggcagaggggctcctcacttcccagtaggggcggccgggcagaggcgcccctcacctcccagacggggcggctggccgggcggagggctgacccccccacctccctcccggacggggcggccggccaggcggggggcttacccccccacctccctcccggacggggcggctggccgggtgggggggctgacccccccatctcccggacggggtggctggccgggctgaggggctcctcacttcccagtaggggcggccgggcagaggcaaccctcacctcccggacggggcggctggccgggcggggggctgacccccccacctccctcccggacggcacggctggccaggtggggggctgacccccccacctccctcccggatggcacggctggccggtcgggggggctgaccccccacctccctcccagatagggcggctggccgggcggggggttgacccccccccacctccctcccggacggggtggctgctgggcggagatgctcctcacttcccagatggggtggctgccgggcggagaggctcctcacttctcagacggggcagctgccgggcggaggggctcctcacttctcagacggggtggttgccaggcagagggtctcctcacttctcagacggggcggccaggcagagacgctcctcacctcccagacggggtctcggccgggcagaggcgctcctcacatcccagatggggcggcggggcagaggcgctccccacatctcagacgatgggcggccgggcagagacgctcctcacttcctagatgtgatggcggctgggaagaggcgctcctcacttcctagatgggatggcggccgggcggagacgctcctcactttccagactgggcagccaggcagaggggctcctcacattccagacgatgggcggccaggcagagacactcctcacttcccagacggggtggcggccgggcagaggctgcaatctcggcactttgggaggccaaggcaggcggctgggaggtgtaggttgtagtgagccgagatcacgccactgcactccagcctgggcaccattgagcactgagtgaacgagactctgtctgccctgatttccttttttgaactgacttagtactgtgcataaaagcaaactcccaagttactctttttttttttatttaaagagatgggtggcctactcttgcccaggttgaagtacagtggtatgatcatagctcactacagcctccagctgctgggcttaagcaatcctcctgccttagcctcctgagtagctgggattacaggcatgcaccaccatgcctagctaatcatcttattccttccttaaaggaaagattttaagaacaaaattatatggcgtgaatttattgatgataattccagttgtataattagctttataagggagttttgtgagaatatttgaggaaatccagatagaatgggttttaattaggaattgtatttattcttatgaccttttggaaattcatttctttttcagggacaagaatccttcaagaaacaggaaaaaactcctaaaacaccaaaaggacctagttctgtagaagacattaaagcaaaaatgcaagcaagtatagaaaaagtgagtaaagttatcttaaaaaaactttgtctcccccctcaaattgcacgtgtctggtttgcatagacttgaatgtttcttgtttttttgtttgttttggtttaatatacttgcctggttcgtggtatgaattttttcaaaaatttcttataaaacatttataatcgtgtctgtggtgatttttgcatatgcaaaattaaatatgccttattttccattatgcaaggaacgtagtgcactggttgcaagataacattctgaccttccatgttaaaatagatcagtgaaaaccctttgcctattctggttgtaagatatgctagagaaccaacagagggcgtatgagacttcattaaaattacaaacagctggaaaagtagatgctggctgttgcttggtattatagttaatattcatgattgaccctagtcagaagtgattttcagcagattgagacatttctctttgccctttacaccaagttgtcaccagttaatacatgtagtaatagctagatttcgtgaatgactaataggcttaaatctagtttccttttgtcttaaataatggaaatgtgggaagagggttaggtctctcatctgcttgactgggggatttgagtaggatatggaataaatggtttaaatgccttggaagcacatttgagagaagctttaattctatgaataatacttttagactccaactattgagagcaaatgtggggtggtgaaaaattgccaactcatttccccatgtttttcttgtaatctatagatttttcgtggcttcagtagattccttgtacagtgataagtccactggaaaaagaattttagaactggaacatatttcttttagtcacactgtaaaccctttagccttcctggttatcactgatttttgtcccttggatacaatgctaaaatgacatcttttagatgcccctcccctccattttaatatggtcctatctccttggtttaattgcaggcgcattgaacagtcctgggcactacatgtaaattaagcccaaagatggggagaaaggaaaaggagagacaaatatagtccatactgagtgtcatcaacaatccagactgaagtcttctattttaatctcaatccccttttctgatttgccacccatgcctcttcaggctggaaacaatctcttggttccctaaagcactttcttctgactgctgtgattcagtgaaccttgccctttgctttctattacttgtgcatttgcctcacctgacaatgttttaaatcgcctttgtatctccttagctgctcaataaatatttgaatgcatcaattaagaatgtatgtgacaataattttgaaatggaaattgtgaggtttattttactaggttattggaggcagttaagtttcttaatgctatacctgattctgccaaagtcccttggacatttgaaaaccttttcaatcttttaaaaatgcataaaagatacttagagggaaaggtattaattaaatttagtaaaaacaaatatattcaatgctttaaattccaaagtagtgataaatacaaacatttcaagatatttgcaatagtaatgttttgaaattttggttacaaagtcacaggtcttgccaatactgttgtagtttcttgcctatatccgtaatttgaaggaaatggtgagagtgattagagaagtgtaattactgtaattttttcccctattgtagtttcttgcctgtatccataatttgaaggaaatggtaagagtgattagtgaaatgtaattactgtaattttttccccattcaactttatatatctttaactgatgaccagatcattgttgttctgaaccagtttgtggtcagcaagtgttttgtggggttttgtttgtttgtttttaaagaacagtttgggtcacttgacatggttctccaaagggatgttatgggttgtatttggttctgggtgataaccgacttgttagataatttagataagcaaccgagttgccatgtttgtttgtcgaatctcaagtgtagcttatattttatgttcctagagaggttgtcagggaagatttgaccctttggcaaatctgtttgaatagagatactagccatgctgcccaatagggctttctggccctgaaaaagatacggagtattcttggaaagttgaagggaaaaagaataaactgatccatgtagtagcatgcagattattgaggaattttctaaaggtatctctctcggtgtatttctctacttacctgtaataatgcttttgtcttaatagggtggttctcttcccaaagtggaagccaaattcatcaattatgtgaagaattgcttccggatgactgaccaagaggtaactggattttctggggacatgattaaatccaagtttttttgtgatttattatgattctgcctttaccctttttaagtgttggctctttttaaaaagttcctaaccacagataatatttcatttaatgaaatacctgaaaactcatgtatttaatgaaatgcatgaagaatacagttggcagtctgagatgataactttagtatatttttcccagatttcctatagttggtaaattatttcttggttattgaattcagttttacttttttggtactatgttggttaaggaaattgctgtggttttccttgctgttccatttgactgcttggggcagtctggtcttggcttttttgggagttggtagagatcttttttttttttttcctagatcttatgggaaatacattatgccaaaatcatcctaacatgaaatctggaagcaagacactaaattgtggctactaccagatacataagcttgagttagctgttagattttacagttagtacatgtgaaagtcttagtcaacataaagattatgcatttatttttgctcttatttacagttgactcataagtgtaaggacaatgtaaaagtggttaaatagggatgttaggtatcgtgtggagaacggatgctgcatttaatggtctttaggtttcctgtggtcagcttttttcaaaaaattaggaaaatttggcaattagctggttttttttctgccatagtattttgcacttcaattatttaattgcacttcaatttttagttttcgggttcgtaaaaccctgataatggttaattttgagtttagctttgtgaaagttgtagtgatgggctataagatgatcaggttcagtctttggttgctgttctgttttttctctacatttgaatcctaaagtttaaagtgtgagttttgggagtttatttggaatactaaacattgattaatcataaattattttgaaactccgcgttatgcaactgtttatttaatattgaaaatagtggaaagtcagacataaataaccagcatgtactaacagctaagcagcataagagatgcattcttcaactactgccaaggaaagtgatgataaatttaatgattaagttgcagtagtcttctgtactttataacaaaggcttgtagctacaaagtcttgtagctattaaattactgaaccagcacttctacaagaagtattttctttttataaaaagtatttttggccaggttggtcttgaactcctggcctcaagcagtcctcccatcttttcctcccaaagtgctaggattacaggcacgagccaccttgcccagcctaccagaagtatttttttgctctagaattgaaagtgttctcaagtgtcagaatgaaatttctggaataaatagtaaatgtttaataacttgaacttgaattgctgttacagagattatcaaaactaaatgcttcctgtttttgacatagagatgcatgatgcaagcaacgacaatgtatatttgtttgaacctgatgataagatctctggctgggcgtggtagttcatgcctataatcccagcactttgggaggcaacatggcaaaactctgtctctactaaaaatactaaatttagctgggcatggtggcatgtacctgtaatcccacctactcaagaggcggaggcaggaggatcgcttgaacctgggaggcagaggttgcagtgagcgccactgcactccagtctgggtggcagagtgagagtctatctcagaaagaaagatttctatgatatttaatattggcattcggtattcagttaccttgtacctgagaacccattggctgtgaaacagtgacagctgagagaatcctgagtcatctcatttctagttcttggtgaacttctggacttttcttcagaaccaccttgccatgttggccaggctggtcttgaactcctgacctctcaggtgatccaacaccttggcctcttaaagtgctgggattacaggcatgagccaccatgcctggccagctgttttttttgttggtttgttttttgttttggtacccatctgtagtgtgatcttggctcactgcaacctctgcctcttgggctcaggcagtcctcccacctcagcctcctgagtagctgggcctcctgtagttgcacaccaccaagcctggctaatttttgcatttttagtagacagggtttcaccatgttgcccaggctggtctcaaattcctgagctgaagtgatctgcccgcctcagtctcccaaagtgtagggattacaggcgtgagccaccatgcctagcctcagcatatagttttttctaaatgtacacatgcccaggcacacatgcacaggcaattcagaataagtttctggtgtttatgtaactttatttgccaaatctggccaactctaaagctgatctcgggagatgaagttggaagtaacattggccatatgggtctctgttctttctgttgatttccttaagtaaataatgctaaactattaaataattattagtatattgttcacatttttatgactgattaaagtgtttggaattaaattacatctgagtataaattttcttggagtcatatctttatctagagttaactctctggtggtagaatgaaaaatagatgttgaactatgcaaagagacatttaatttattgatgtctatgaagtgttgtggttccttaaccacatttctttttttttttttccaggctattcaagatctctggcagtggaggaagtctctttaagaaaatagtttaaacaatttgttaaaaaattttccgtcttatttcatttctgtaacagttgatatctggctgtcctttttataatgcagagtgagaactttccctaccgtgtttgataaatgttgtccaggttctattgccaagaatgtgttgtccaaaatgcctgtttagtttttaaagatggaactccaccctttgcttggttttaagtatgtatggaatgttatgataggacatagtagtagcggtggtcagacatggaaatggtggggagacaaaaatatacatgtgaaataaaactcagtattttaataaagtagcacggtttctattgacttatttaactgctttatactttgtcaaagaaataattaatgtagttaggaatggcaaatagtcttgtaaaattctatgagaatgtccctgccctccccttcaatattctctctggagctaaccactttttcatcataaggatttagtgctgtgttcccacctcctgatgatagttaacaattattataactatgcaacatgtttccaaatgttccattagacctcctatctgcctattctagcctcacttgcaaagaaaatgtggcatgttaaaacagcttaaaagcagcctttcaacctgtatggttttttcccctaggctggagtgcagtggcacaatctcagcttattgcagcttctgcttcttgggttcaagcaggtctcctgcctcagcctcccaagtagctgggattacaggtgtgagccaccagcccggctaatttttgtatttttagtagagatggggtttcaccttgttggccaggctggtctcgaactcctgagctcaagtgatctgcccacctcggcttcctaaagtgctaggattataggtgtgagcaactgcacctgacctcaacctggattccttatctgaatcaaagcaattatttcagtgactatttgctcaagttgcctagtacttcttacagatgtataggagaaaatttatcacgtagataatgaggatattcagagactaattagcacctttatatgttctgccttaagctgattacatgatctgagtcagatatactgatttgatttctattgttttgttgtgctttatactccagtagtttgagtaggtgagggaatgttctccagttctgtgccgttttccttgggagattttcatctcccacttctatccattcttagtctggtttgattgtcttggatggtttttctcattcctttttgtttaaacttgggaaagagactttgattttgtctttaaatttttgtgttgattttaatataccaactgcttgctgctttgggcgtgtatctgaaatctaaaaaacattactcaacattttatttattccaacattttgaagtgatcgtgaattttttttctttcttgttttgagacctattctcgtctgtcacctaggctggagtgcagtggtgcgatctgagctcactgcagtctcctgtctcagcctccaaaatagttgggattacaagtgtgtgccaccacacctggctaagtttgtatatacatataaaaataaataaatatataaatatatagtatatagatatactaaaatatacatatattttagtatagatggtttcgccatgttggccagtctcgaactcttgacctcaagtgatctgcccgcctcagcctcccaaagtgctggcattaggcgtgagccagtgtgcccagacaggttttcatcctatgtgtttttgcctttaactttctagtagcctgtttcatttagcaggttggcatttgttaactaggctgatagttgtattttgaatcggatctgtagatgttaacccttctcacttctaggatagttctccactttggagagtggagaaaagtttgggtacagtactatcttgtctcataaccagtttctgggtgtcatatatgtgttctaattgtttactgtgggttgtggtttccttcattaattcagtatcctctatcctctatccatatctgtccatgtttttctatacctttattttaatgaagactcaagagaggatggtatgttgattgcctcactggaaagtacttttttttttttttttttggtgccaccatgcccaactaacttttttgtcaagacggtggttttgccatgttgcccagactggtcttggactcttgggctcaagtgatctcccacctcagcttcctaaagtgctaggattacaggtgtgagccatcacatctggctggaaatgatattaatgtgattttttttttggccaatttttagagtgatggattgatacctagcagcctgtgaaaaggaatcagtgaatttatccttaattcagattttcatgtatttgtatgtatatcaacccactgtgtttttttggtgctgatattttctttttgaccaagggaatccccttcaagcttgctcctaccatagcaggtctcaataatctgatcactcttcgatttcttgtgtgacggggtgtttcatcttgctcattttcttcctcagacctggaggggccatttcccccaaagaaccttggctcccttagaaataatggtatttgtagaccactgtctgggtgggaacattgcttgttaatactgggttctaggttagccagttgattagatcagaccagaccctttggaaaaacaagggaatgaacaattctaagtgctgaggagggcatccatgcacaggttggctgacaagcttttcataagtcaacagtcaatgtaactacagagctgccctcagtttcaaccagagaacaggtaaaataggttacagtagtaaaaagtaaggccatgcagggaaagcagatgagcttaaaaatatgctaatacagaataataggtttatagtggtgtatcactgcagaaaatacgtgattttgacttaatatgtagtcacagattacttaatgatggggatacatgctgagaaacaccattaggcgattttatcatgtgaatatcagagtgtacttacatgaatttaggtggtgtagcctataccatacacctaagctgtagggtacagcccacgcctccaaggctgcaaacctgtacagtatatttgtactgaatactataggcacttgtacctcaatagtgagtatttgtgtctctaaacagaagaggtacagtaaaaataagataccaaagaaaagggcatacctgtgtagggcactggaatgaatacagcttgcagaagtggaagttgctgagaatgaaaagcctaggacatcacactactgtaaactataaacacagtataattatgttaaatataaaaatgtttttcttcattaatgtaagcttactgaactttgtaaaacttttaaaactttgactcataatacttaaaaaactacaaaaatacacttactttttctctctctctttttcccgggctggagtgcaatgctgtgatcttggctcactgcaacctctgcctcctgggttcaagcaattctcccgcctcagcttcccaagtagctgggattacaggcacccaccatcatgcctggctatttttttttttttttttttgtatttttgtaggggtttcatcatgttggctaggctggtcttgaactactgacctcaggtgatctacccgctgggtagtgctgggattataggcgtgagccaccgttcccagcctcaaaaatacattcttattctgtacacttctattaagtttttttcaacttttctgttaactaggcctaggcctaccatagggtcaggatcatcatgtcacttatccatcatatattgtctcactggaaggtcttcaggggcaataagacgatgctgtcatttataacattgccatataactgcctgaggctttttttttaaaggatcacactgataaaaagtgcaataaatatgtaaatcagtaacattgattttcataatatcaagtatgtgctgtacataattgcatgtacaggtttctttacaccagcatcatgaacatgagtaatgcatcgtactctgctgttaaaattgctacagtggtcagctcccttatagtctgggcccatcgtacaggtggtctcttgctaaccgaaccatcgttatgtatcttttatttttgttctgttttttgagacagagtctcgctctgttgcccaggctggagtgcagtggtgcagttttggctcactgtaacctccgcctctccggttacagtgagtaaccttctgcctcagcttcccaagtagttggaattacaggcacgtgccaccacgcctggctaatttttatatttttagtagagatggggtctcaccatattggccaggctgatctcgaactcctgacctcaggtgatctgcccgcctcggccttccaaagtgctgggattacaggtgtgagccactgcgcctggccagctttttttttttttcttaacggataacattttttttttttttttgagatggtctcactctgttgcccaggctggagtgcagtggtgtgatcttggctcactgcaacctccacctcccgggttccagcgattctcccacctcagcctcccgagtagctgggactacaggcgcatgccaccacactcggctaatttttgtattttttatagagatagggtttcaccatattggccaggctggtctcaaactcctgacgtcaagtgatccattcacctcagcttcccaaagggctgggattacaggcatgagccaccatgacccgctgtgtagctcttggcagtactagcttaatgagcaaggagagatgagcattgtatagggcgtgggtcttttcttggaaattgtccaaaaaaaaaaaaaagttgagagttaacaagtatatactgagcctattaaaggtggcctggactctggaaatacagggttaaagttatttgagaaagtctgaggctactttccagccagttccttaatgaaaagccagttactccctgactcatggacttggcagtagaggtcccaagttttaatgctgtgcgccttctaggagctggctttgagaaagcttagagcctcatttgtgctaagggtctacttttcttattacctgatagtgctgcttgaggctgtttgtcctttttttttttttttttttgagacagtctcactctgtcccctaggctggagtgcagtggcatgatctcggctcagtgcaacctctgcctcccgggttcaagcgattcgcctgtctcagcctcctgagtagctgggattacagacacgtgccaccacacctgactaatttttgtatttttagtagagacagggtttcattgtgttggttaggcttgtctcgaactcctgacctcgtgatccgcccacctcggcctcccgaagtgccgggattacagacttgagccaccgcgcctgtcctgtcctgtgttcttaggctggatgttttccatctttgtctccacaatatttgtattccacagattccctgaatcttaggagtcttctcagtcaagactgggaagaagtgggaaacaagtggaaagactgcagtactcagtttacttgcacacttgaacaaagggatttaaatatatactctgtttcagacgaaagttctaggtgcgtagggttagtaggcaaggcagcgagatgctctgcagggcttacatttcattgtgttacttgtcaacatatattcttaactcccctcagaaaattgcctgagtttattagcttagagctgggaatttaatgcaggtgtgtctgattccgacccccaaaatagcacatggctgcgtagcccaagctacggtacccttacctggactggtaacagctagcttagcatcctccttactccagctactaagaatgaagtggaatggtgtaacagcattccacttcattcttagccagggtaaagcttttttaacaaactgaattttgactgtttcaaagcccttaattgacaaattgtggcatatctatactattaagtactatcccacgatgaaaattgactactgcaaaatgcaacaatggatcaatctcaaacatgctcagccagacacaagcacataataggtggttccatttatgtgaaatcgaaaataaaccagtgccagataaatgattgcttgggacgagcaattgggggccggaagattgcctgagaagaggtggtgtttgtacctagatacatttgtcagaactgaactgtacacttaaaactgatgcattgcaaaactggtacccttaagccattgatggctacttaatttcctgtgaaggcctggtcaagcacattgcctgttttcaccctcatctcttgccacactctccctggctaaccctgccagtcgcctagcctttttccactggaggcactttgcatcttttacctggaatattcctttgcatggctatctactgtctttgggtcttggccttaatgttaccaagaggtcttctggcttctctatcccactggtttctctcaaaacactggtaacaagccagcatttatctcttggtgtatttgcttattgcccatcttccctagtggaaacgaagtgcttttttagtgcagggaccttgcctgtctttcagtgagggctcgacactgtaggatctcaataaattgtgattgaattagtaagaagtgactactaaaatagtggtatatattaagtgttgtatgaacatgccaaatccagatagaacccatttaagattcaggcatatggtaaataggtcatgttggtaaataggtgcatgaaactagagggtgtgagtggtggggaaaagaatgtgtagtataaaatggatttggagtcaaaagacattctgactagatgcctcttcaactgtaaattggaaatgatcctgcctccctacttcatgaaattgttcagaaagaaatgtgaaaataacctgaaagtaacctgaataataattaggattattagttagcagctaaaacgtttggagttttcattgtgtgccagacactcattgagtactcacaactctgtgagagttgttactgttcttagccatattttgtagaggaggaagcagaatctcaaaccgttgcttgctggaatttataagtaaatgttggtggcagtattcaaatgcagtacttctgactcctgagtttatgctcttactcagaactgttctcttggctggactttttggtcagtctgatttgtttggtaggtgagattggcaaatatactttgagcattgaaaaatactgcaagcattttagatagggtataaataattatatacccattccattcacaagtaataaaaaatagtaacaatatagaaaattggaagcatgattcttagccaggagatacttcaaactagcagatggtaagccaaaaactcctcgactgggtttgtcaatcttcctataaagcaagatcaaagacggcggcaatgactcgggtcatcggtgggagcatttctgtccatttctatttatggttggtcattgcatcctatcttgggatcgattcattttctccagaacttgggaagttacgagtaactctgcaagtccagctctggcaatcagaatgtctaagtaaattcagcttaaaagcttcatgcaggaattttccccctcagcacctggttttgaaaaggttttctgcacttgtgtccgatgttgaaacagaggctatctgtttaaaatagcctcagctttgaaagggaacttaaaatagcttgcaaggaggcctgatatttggaacaattactaatgttttatagtcatggcttcagcaaatagcactgttcgacagtcctacctcagtttatgctccagtggaccatcaaccattgccaacgcaaggaggctttaaccaaatagtccagattcctgagttttgcttgagcctgtcctccagcgtctttctcactgtgacctattttccttagcatcaggctcaagcagagcttggctgacaccagctctagacagtgaggcaggtacgtgacaagaacacctacgttttggggttggtgggaaggacaggagttatgcctctggaaggggcagaggcggtaagaaccagtgtcctgaatggggccctggttaaaggaacgaagctgcctagtatgcaaacggaggcaagtcttagtccggttttgggaggaggccggaagagggcctcagcgtggtcgctgaccagagtcctgctggctgctccccggcgtgcagccgtccgtgctggggttgcagtgacgtctcggggccgcttggtggtagccgtgtgtttccaaagctggctcgcctacgggagagtccagctgggatcccgtgaaccgaccccagagccccggagggggcgaggggtgggaaggagagatgcccgggagcccccttcgcagcggcagggacgtaagaagaggacgggggctcacttaagtgggtagccagtcaagagggtggctgggaaactccacgatcgcagggcgggtaaaagcgacccccattcagtggagccgccccggggctgggtttgacccgcccctctcggctctccactagagcgctggtgagtgagtgcgagtagcgaatgtgggcaggtgaggacgttccgtacctaactgcgttcttggggagcatcgcctgcccaatttgggcaacgtttgcgcggaggagcggtcactgcgctcgggcgcagagctccgacggcttccagcgctcaccagcttcagtctcgcgggtcctgcccctttggagctgccggtcccgtctccgagagtctgagcgcctcccctccaaccccgagccgccaggagaaggaggaggaggcagcgagaggccgcggcaggcaggcgagcaggcagggccgcctttgatgtgggctgggcgcacccaggcgagctgagcgcccgtccggccgcgccccgaggggggagcccccaggccccgcatcctcattgtgccggctcgggcccgggcccgcccccggccccccgccccctcgccgcccgcgcgtagaaaacgccccggccgccgccagtggtgggaggcggcgatgcgcacggccggagagacgcggaggaggagacatgagccggcgggcgcccagacggagcggccgtgacgctttcgcgctgcagccgcgcgccccgaccccggagcgctgacccctggccccacgcagctccgcgcccgggccggagagcgcaactcggcttccagacccgccgcgcatgctgtccccggactgagccgggcagccagcctcccacggacgcccggacggccggccggccagcagtgagcgagcttccccgcaccggccaggcgcctcctgcacagcggctgccgccccgcagcccctgcgccagcccggagggcgcagcgctcgggaggagccgcgcggggcgctgatgccgcagggcgcgccgcggagcgccccggagcagcagagtctgcagcagcagcagccggcgaggagggagcagcagcagcggcggcggcggcggcggcggcggcggaggcgcccggtcccggccgcgcggagcggacatgtgcaggctgggctaggagccgccgcctccctcccgcccagcgatgtattcagcgccctccgcctgcacttgcctgtaagcgcccgcgcgcggggctgcccaccttgcctggctgtctgtccgtatgcctgtgccctgtacctctgtctgcccgcccgtcggttcacctgactcttcgactgcgtgtctgtctgtccgtgcgcccccttcctcaggtcccactgaccgcttctccatctgtttcccgcaggtgtttacacttcctgctgctgtgcttccaggtacaggtacgtgggctcctgactttgacctcctcccgcccctgcctcgcggtacacgccgaccccccttccccggccgcgccccctccctgtgccccacccctcctgggcgctgagcccagtgcacctgttcccagggcgcggaagggcggctccgcgtgcgccctgcgccggcggggaaccggccaagggcaaggggctctgccgcggggcccgaggaggcgctggctgtcgcggccactgtcggcctcggctgggaggagatcccgcagagccggcgggctcagccgcaacaatatacccagctctaagacccctgcccgcagccagcgaggggtaggacctagggattttctctgccaaccttcccttaacatcgccgcttccaaacaaaaagactttcagccgagtggatttcgagtccagggagaaagcttcagttgtaaattactctgtggttttgaaggcgcttgcagcactgagacacacacacagacacacacacatgcccgggacgaggggaagctcgagggcgcctaggccgagtggccgctgcccgcgaggccgctcccggatgggccgcgctccgcactccctcgcctaaggtggtgcagccctcgttggttccccgcctgctcccggttcgctcgctctccgtgaatcagaagagggcttggcgctcggcctggaaagcacttgctaaaatctgatctgttacttcagcagctttcagactcgggaaggtcttggcacgcagacagttggaacgctctggcttccaaagccgtagaaatgaaggaaaaagggttggggggagggagagagaagagcgaaaaagggagccgacttcagccccgattagaaccagaccagggctgcctctgcatggtgggggtcggggggcggcgggcaaagggaataggaagcgtcagctccccaagcccccacccacctagtgctgcaaggggccaggccaggaggaactggacacaggtcaaaagagggttgtctgacccttccccctcggtggaaggcaggtggctttccgggattagagaagattcttagaccttagccttctggattgtggagatccccagagctagccttgagcacaggaaattggtggttctcccggttttctggctcaaggagtgttgtgtgccttgagcactgcgcgactcaacagccactcgcagtgtttggcggtggtgggcctgctatcttccttccacgcccaggagagggttgttaccctcctgataggcactgagctgggggcatccattggggcttggggatggaagggtggacggactgatgggttctttcctcctgttggccaggctggggtccccagtgactccttgaatcaatataactggagtcagtaacttaagactggctgtttgccaaagcagatgtgacctgtgtggtgatgggggtgggggtggggaacggctggtgtcaaagagggaggccagtgccaggcatggcctgcctggtctgcagctgagtccccaagcagagggcaggccctggggtcactccagggggtctgcttgtctgacctgggcaagagctcttttccagagtgctgtgcctgggggcaggagggatgaaatgggcaaggagtagcagggaggcctgcggatgtgtggctcaagcctctggatgcctgctgctgttggttcttcttgaagtagggcccaggaggggctgctgtgtggtctttgtgttctccgtgggagctggagggagggagtgtggactctgcatcccacctccacctcctggccagagctagagccagcatcttgggaaagagctgggtggtctgccctggttaggtcaagaggcagccttcaagcaggtgagggatcctcctctccccaccacctccaccttcccccttgtccccaccggcctttctgcatccaaagtgccataagactgatgtttttaacccatggtccatgtacccttggagtgtcaaaggatgggattgtgggagggggaggtccctgaaacactgcacaaaaatggtgctcaaatgtgctgtgtctggaagagggttgcctgctccccacagagtttcaaaacatctatgacccctaaagataaagaaatgttatcctgggagttatgggcaaggttgtcaggcttatgtccccattcacactacaggggcaaaggtggggtggccttaatggttgaaatgaggggtaggagccaaatgatgttaactgccaggaatctggggcctgctccctgctgaggtttgggtaggctgcacttagcgggtagcagttcaagctcctttagggtgagccggggccagggaggcctctctacatggcaggaagggctcagggctttgcaatccagtggcctaggcctgaaccccagctccagctccatctttccctctctgtggatccccagagtcttagctgcatcatttatgaaatggttggtcatggagttgaactggtatatgatggggggtggggtagttttgccagttctcatccacccaggaaggcacattgtggctgctgggaaatggatgcgcctacgcccttccctcccctcgcagtgttttccaggactggtccagtcttagcggtggagtttctgggcccctcctttcttcctgtccatcgctaccgggctcagaatgggtccctgcccccagctacgtttccatgagcacattcagtgccagacactgtcctgcccacccccaaagtggtgagcccgccctcacccgctggccaccctgggaagtgggaagctgggaatttaataaaatcccttcatcccttctccacacgactcaggacaccgtagatagctcaaattggaagaattttaaaaatttccgtggggagcaaacggcgtgaccagtaaattgcttttctgcacttggctgagctctgacaatgacaccgggctgggcctttcacgcagctcggccggcacctgcctgacattgttcctgccgccaggctcggctaggtcctggccttccccagacagaccaggcatgaggcgggccaggctcggcggggtgggggggcatcccctggcctcttgtccctcctgccagccccttagccccttgtccctcctgcagcgccacttcctctctcaccacaagaagtgttcaagtttggaagtttccttccacgccccctctcggcctgaccacccccacacccagcctcctcagtgaggtttagaccctttctttaagctggttaggatggggaagctggagacagtgtcctttggtgcaaaaagaggatgggatgctctgttagtggatggcacttttttttttttttttttttttttgtgctctgtcacccaggctggagtgcagtggcgtgatcttggctaactgcaacctctgtctcctgggttcaagtcactctcctcagcctcccaagtagctgggattacaggtacacaccaccatgctgggctaatttttgtatttttagtagagacagggtttcaccatgttggccaggctggtctcgaactcctgacctcaggtgatctgcctgccttggcctcccaaagtgctgggattacaggtgtgagccatccacctggccttttaatttcctaaagcaacatcatccatccatccacagtcaggtattcattcagcacatacttgctgggagcctgcttcttgctgccttgggaataaggtctagtcagtccctggcctccaagagctcccagtttaaagggagaaagtgccagatgaacagagccttgtctattctgccccctcctctcccagcactgtgaagtggagtgaggcaggcacatacatcttcctcccgtttagcaggggaagaaactgagtcccaggagcagtgatttgcatgaaggaaaaagatggtacttgtagaaattctaaagtgtcccttacattgggaagctggttcacttctttcaaccattctacagggaggccaagagagggtaataattctgtttcacagatggagaaaccgaggcacagaatgaggaagggatttgttcagacccaagatgctggattcaagatcttgtattctttctaccatagcagatggaccttcttctcaaagaatcctgaaattattcagaagaatattggtgggcccatggagtccttagagacatgctagggatctgcagtgagattctctttggattctggtataagggggatgttgagagcccaggtaggcgtctctgggcttgagggtgtctgacttggagtctgcaggtcctgatcctcctggaatgtgttgatctgagagggtcccagagttagaggggggtacttgggggctggggcccagaggattcagcactcctcttccagcctatccccagcagagggggaagggggagggggaggggagggggcggggctccccatcagcattcctgaagcttgggagtgtcacccgctctgagataaggaggtggatttttagaatttcttgtggttggcacggccagtgtcagcaggcttggggcagcccatcggtcacagatgcagcctccaccctgccctgggcagctccaaggacgcactggacccccaaagggagactagaggggtaatgggaagagacttccattttctgcagggccttttggttctgacctagtcctctagcaggagacttgtgggtgtggaaaattggggtgcagtcacatcaagccatcaaaaacaacaacaatattcatagtgaccaccaggtatagtgcactcactacatgccaagtgctttttttgttactgttgttgagttggagtctcactctgttgcccaggctggagtgcaatggtgcgatctcggctaactgcaacctctgcctcccaggttcaagcagtcctcctgcctcagcctgcatgccaccatgtctgggtaatttttgtatttttagtagagatggagtttcaccatgttggccaggctggtcttgaactcctgacctcaggtgatccacccgcctcggactcccaaagtgctgggattactggcatgagccactgcacctggccgccatgtgctttttttttttttttttttgagatggagtctcgccctgttgcccaggctggagtgcagtggcgtgatctcggttcactgtaagctctgcctgccgggttcacgccattctcctgcttcagcctcccgagtagctgggactacaggcacgagccaccatgcccggctaattttttgtatttttagtagagatggggtttcactgtgtttgctaggatggtctcggtctcctgacctcgtgatctgcttgcctcggcctcccaaagtgctgggattactggcatgagccactgcgcctggccagccatgtgcttttgcacattatccaggtcaagcctcacaaccagcctggaactagggaattctacagaggaagaacaagagaggcaccggtgcataaagtaacctgcgtttggtcacatagcaagagagaggcagagctggattcagctctgtgtctgtccggctctaggactcaagcttacttgtatgagggctctggagtgtggctctgctttctctttgctgtgtgacctcgggcaagttacttaactcccctgggtctcagcttctgcatgtgtacaatgggaaaaaacaaccaaagaaatcatccctactgcctcaggtagttgtggagggacagtgcatcacccaaactcttgtttgtagtccagaccctgctcctatgcctcttactctaggagggttcccttgccccctgcccgcccccatcagatatagagtccttccccagggctgctgccttgtcgtcactgtgggaggggaggtgttgatttctcctttctgtgggtaagggctgctctgaggaacctctgtatgctcctagcttttgctgtgttggctcttctctaactcataagaccccatggcagtgcatggaggggagggctggccttagaaggggcttgggcctgctgtcagcactgtgggcctgagcatggggatttattctgaaactgcagcaggtcaggaggccccgtgggctttggtccggcttgctagcagtgtgtttgctctgacgtctcagtggcaaaaggcctcaggccattcaaaatgctgttgtgccaaggatggggccaaagacaagccccctgtgggccacagagtggaatccctgaatacctgggttccaatcctggctctgtcctgggctcactgacctctctctctgagctttgatttacccgcctgggtatcagtgaggcgaggtcagtggcttctgtgatgcttgaatgcataggctttggcgtaggggaaacctaggttgaatcctggctgtgcttcttggcagctgctctgcaaatattccttaaccttcaattttctgcacctcagtttccccatctgtaaaatgggatcatgagaaatacctacttctggccgggcgtggtggctcacgcctataatcccagcactttgggaggccgatacaggcagatcacttgaggtcaggagtttgagaccagcctggccaacatggtgaaaccccgcccctactaaaaatagaaaaaattagccgggcatagtgggtgcctgtgatcccagctactcagaaagctgagacaggagaatcgcttgaacctgggagacggaggttgcggtgagccaagatcacgccactgcactccagcctgggcaagagcgacgctccatctgggaaaaaaaaaaaaaaagagaaatacctacttcttaagggttattgtgagaactaagtgggatattgcacacagagtagctagcacaatggcaaaacactcgatgagtaatttagtaaaagtaattgttcaatcaattatattgtctgtgttaggtacgtaacatgctgtggggtgctagggaaagctagaaaggacgtgttccttggatcagtgacatcaggcctcctccagtctgagttgggagcacaggctttggacttaggtctggatttaattgccactctaccactcaagactgtgtggccttgggcgaggcccttaacctctctgagtctccacttcctccccatgggcaaaataaggatgctcatcccactcccctggcctgttggtaggagtaattgatgactagctatgtagtaggcactcaaatatagtgttgctcgtcatcaacaatccacaaacatttatgggacgcttgctgcatacctggccctggactggttttgaggggaatgaagaaggtatccaaggcttttccttccaagtgttccccatgaagagatggcacgtacttcgagaagctctgtttcccccgatccccatcccaccttctgccttggaatcgcatagcgcttggccactgtctttgatccagggcgctctgcggggctcacagggatgggtgggttctgggcccagcacgcttcagttggccgtgtgaccgagtgattgactggcctctctgtggcttatcattcctgtaggcatcaggacagaacctccctcctggggttgctgaaagggtgagttccccctgcccgggggaggcacttggcatagcgcctggctcatgataagtgttaagtaaatgtgagctgcgtatctgcattcaactctggggtgtctcaaggccggattgtccaccagcccacgggttcctggaagtcaaagggaggtctgacccctgctgcaggcaccatggcacctggcacagacctggcatgctggaggaatgttgggtcagtgagtggaggtttgagggagaggttctctggggaccgggatccagactgaatccccccacccactcatctgtgccaggggctggggcacagagagggccagcacctatcccagccattggaaacttgagagaaactgggagtatgtgctggggagcaagagctcaagggtgcagcaggtactctgctgacaggccttgaaccagactctggggcaagagggtctggcctgggtagatgtttcacgtagaccttgaaataagagcaaaccgggtgaagaggacactgtgagcctctgcgtgcgtgcatgtgtctatgcgcatatatggaagagccttgcaggcatatggaacggtgctactggaagcagggatcagcctggtggactcacagagctccaagctgactggggtggctggcgcatccattcccaggaatggggatgatggaaaagaccgtggtgggctttgaatgctggaataaagggcttgttacctcatgggcatggatggccattctccctacccaggggctttagggagctggaattgaaacagggatcagtgggaagaggaaagggagagagagaacaggccatgggtctttacggctccagggttggctgcctgcagcagcggtgcccatattgatgatctgtaccatgaaggctgatgtatggggagagggaggccgaccctcgggcccaaccccccatcctgcagtgcccccctcccctgctgatggctcaaccctgccaatcaatacattgatagccctgggagcataatggacagtctggggggtggggaagggccctttgcggcgtcactgtctgtcctggctgagttggtgtgcggagtgtcacaggaaagaggccagaagcccggggttgaggaggtgggggcacccatcagagccacactcagattcagggtgggcccggccttcctcctcccctttccatccatgggaaactcatgggcttcagatccagagatgggttcagatcgtggctctttcagtttctgttcaatttgggccagtcccgtggcctctctgtgtcttcctttgtcacctggaacacagggatagtaatagtttcagctgctcaggttgtgtgaggagcggacatgggccctggcatgggggcaagtgcccagccagtgggagccaacgtgagcttcactctcaatgacagtaatccagagagcgtcccttgggccagagtccaggaagagttaggggagctgcgttttcaggtggagagagtggctgactttatcgggaacccccactggagaggagtgaaggtctccagtttgaatccagagtttggagaagctctgaaagccttggctggcccgatgctgctgctgctggaggagccaggtggtgtggaatgtggctggaagtctgggggctgcccctcctgggaccagggagaccctccctttctgggcaggttgcctggagacaggagcatgggtttcatgaagcctcaaggatcagaggatgaggcctgggcgggagaggccgtggggctgcatccctgtctcttgggtgggggcagaaagctcaagggccccagctttttgtggacaatattccaacctccttacccccaaactatggcctgtggcctgaaccagttgtcgtcctggaaaagtagaaaggaggtgggtgaggaagaggagggagaacagtggcaggcgagggcaaagcaggagagagcctgggctggatttgcatcttgatttctcaccaattctgtgacatagaacaagtgatgtaacctctctgagcctcagtttccctctctgtaaaatgggaataataatcgtaccaggctgagcgcggtggctcacgcctgtaatcccagcactttgggaggccgaggcgggtggatcatgaggtcaggagttcaagaccagcctggccaagatggtgaaatcccgtctctactaaaaactataaaaattcactgggcgcggtggcaggcgcctgtaatcccagctactccagaggctgaggcgggagaatcacatgaacccaggtggcggagattgcagtgagccaagatcacgccattgcactccagcctgggcaacagagtaagactgtgtctcaaaaaaaaaaaaaaaaaaattgtaccaactcatagggtttgttctgggcattacataggaagacatccctcaagagattcctagcacagaggaagtgctcaacacacaatgcctgattaagaaacaaaactaaactaaagaaaaaagagggccgggcgcggtggctcacgcctgtaatcccagcactttgggaggccgaggcgggtggatcatgaggtcaggagatcgagaccatcctggctaacaaggtgaaaccccgtctctactaaaaatacaaaaaattagccgggcgcggtggcgggcgcctgtagtcccagctactcgggaggctgaggcaggagaatggcgtgaacccgggaagcggagcttgcagtgagccgagattgcgccactgcagtccgtagtccggcctgggcgacagagcaagactccgtctcaaaaaaaaaaaaaaaaaaaaaagaaaaaagagtaatgattgttactaatataatctttttctgagataaatattatcaacagtccccattttgctgatgggaaaactgagagctaaagaagtcgaataagtgggttgactgggggtgaagccaggtgacagctaaggtcagccagtgctggttcctgtgtgagtgttgcgtgtgtggtgtgtgtacataggtgatgtgtgatgtgacgcacatttgtggaaggtggaaatgggggccaggaagaaagaggaaaatcccaaacatgcttttcagccatgagtgggctggagaggctaaaatcttcaagccagagggagtgatggaggctgctggatgctctggtgtgaggtggtaccttggttgatctctggaagctggtactaggctgggggctcacctcaacctcttttcatcacgtggaaggttcttaccaaggtgcctaagaggggaagcttgcaaggtagacagggctcaattgtaaggatgacacttggctgttgtcctgggtaatagggagcctgggcagggacatggcatcacattttgtgttaagagctgcaccgggagaggatgagaccgaaggcagaaggtgggtgggctctgtgccactgagccccatgattgtccccagggccgggggaccttggaaggcttgggggagggatttgagcctcttggggcctcgttgcctctgtgtagttgctgcattggtagagtgaagatttctaccagaactgaagccctcaaggcaggggaagcaggggctggggacagttgggatcttaggctgaaggggaccctaggccaccatgctgtgagaaaagctgcttccacccaaaagataatccatgtgcatggcgtggcaggaaaggtggagtgacaaaaggcaccttgtttccgtagaagacttcctttatgcaccaacccttctctcctttcgagagttgcagcagactgggcgcggtggctcacacctgtaatcccagcactttgggaggccgaggtgggcagatcacctgaggtcaggagttcaagaccagcctggccaaccctgtctctaccaaaaatacaaaaattagccggtgtggtggtgggcacctgtaatcccagctactcggggaggctgaggcacgagaatcacttgaaccggggaggcggaggttgcagtgagccgagatcgcgccactgcactccagtctgggtgacagagtgagactcagtctcaaaaaagaaaaaagagttgcagcaatttgattttcttcaaaccgcagcttttcaacacccctgatcattggatgcctggaggggtgttagccaggccgacagcaaaattgactgttctgggaagaccttgaagataggccccccttgcagggcaccgagccaagtgacctgccacgcagctagtaggacaggagaagtggatgttcccgaggcagccccgctatgcatgtgctctggcagcagaccttgaaatgggctttaactggtgctcacctccacgggtcgctgaggtgccatgtctgggggtcattttcttcttcttcttcttcttttttataaaaattatatttacttatttattcatttatttatttatttcagacagattctcactctatcacccaggctggagtgcagtggtgcaatctcggctcatggcaacctctgcctcccagtttcaagtgattctccggcctcagcctcctgagtagctgggattacaggcatgcaccaccacacctggctaatttttgtattttcagtagagacagggtttcagtatgttaagatggtcttgaactcctggcctcaagctggtcttgaactcctggcctcaagcgatccgcccacctcggccttccaaagtgctgagccactgcgaccagcctaggggtcttcttagcagagtgtctggaacaggggaatgctgggtagtcagttgccttaacacatccctctgtggggcactctggttggtaagtgggagggctgatgttggcctccagatttccctcacttttggccgccgccttttggcatgcgtttgctggttgccttctgagggcagaggtgagattcagggatgaaccagtcacactggacttgggacaataagccattgcagtagagtgttcgggggccctcacccagcctgggaggtggggctaggaaaggcttcggggtaggacgtgtcacaccctccagaggtcttgcctgggaagcccggggtgcttcctgcctttccaggagaacagaccttgtttccgagccagaggccaccagaggccacccccgccacctccctgggggctgatctggccacagaatggggcttcaatggtgggagctgggcaagatggattgttccctcccgcatcctggggaagtgccacccgatagcccctgctgaccctgggtcacccacactgcctctgtccagtgggccagggagaaaatcattaatgggaggccggcttctggggcagggcagctccccttggggacctgggggaaggagattggtttgacctctggtcgataaggtctcctgtgagcaggaggagagtagaaggacagggaggggacgccagaggcctgcccttgggggaggggacagggccagccacctccggaagtcattccaggaaggtcaaaggccatgggtggggagtcttccggacaaatgcccaccaggtgtgggcctcaggagcactggagttcttctgtccctgagcagcaggatgtggaaggaggcgggacccaggtatcagacccgggctgtgagtggtgactgtgtgtggctgctgagggctgggggaagtgaagaggaggcacacatggtgggccagcaggccaggccctgcctcactgggctgtgtggtttggagcaatggacttaacttttctgggccttagtgtctccatccattcaatgagggtgataagcgttctcatggtgcaaggttgtcaggactatcaaaagcaatagcatcttcccagatataaatctggtttgcagggcttcacctagggccccataaagggttcccttgtgttctatcactagttacccctactgagccaggcactgctctgagcacttaatatattgctttatatgtttaacctttgcagccactcatgaggagggtgctgttatcatcaccctattttataggtgaggaaacaggcactagagtttaataacttgcataaggtcccttagctagagagtggcacatcctgggttttgaacccagggccagctcctgacagcactggtggggcaggcagggccccgcaaggcagtggcctggggctgcccgcaggggtggggcacaggaaacacagtctttagggtcacaaggcctggggttaattctgcattactgctctggggccttgtcagtggagctgacagtttcctcatccataatgtgggatgatgcttccaccctgaggacaatcatgaaggttcaacaatgtggtcctgctgacatacctgtgggcccagtccaggatcgggagatacatgcaggtcagcttggggacagagatcctgctgtagcaaatgaaggaaacacatccctgcccttgggagctcacagctgagaggtgagacagatgtttgggcagccagggtcccaagagctctgccatgggctgagtgggggcgtgccagcgtgggaatgggggtcccttgtgcctagcattgtgatagactttgtgggcacacagggaacaaacccagaatgctgtctgggcttcaggaatggctcagccttgtggttgacatgggataggacatgcatacaaccagcagggtgtaggggaccctgctccaatggtaaatggcacagcaggactccaggtcttttcaacatttgtttatgtatccattcaagaagcgtttgagtttctaccgtgttaggtgctgcggatatagtggcaaatgagagacactgctccagctttctctcccttttttttttttttttgatggtgctgccagtctactggggccaaaagacaaaacccagataagtgctggaaagaagcgcaaagcatggttgaggggagggagagtgtcagagctggaggtggcttcagaaaggggtccaggaaggcctgcttgaggaggtgacatttgagcagagacccgagtgagctcaaggggttagaatgtaaggatctgagaaagagcatcaaagcagagggaagaagaagtgcaaaggccctggggcaggagtgtgttttgattttggaatgcccagagccatgccaaggtggccagtggccagcgtggctggtggggagggagtggtgggagaggaaggtgggaaagcagtcaggggctcaccttgtagggccttgaggccttggaggaatccttcactgaagtgtgatgggaagccccggagagtgtggagaggggattgggtttggtagaagagagactaccagggggcgagagtggaagcagaaggccagtgaggaggcaggtgcaagttgtcccaatgagaagggaaggaagatgagcacgatatgtgttggtataaccagggaaggcttcctggaggatgtggacaggcacaagctaagcctcaagggaactgaagttttggtggcagatgcaaaacaaaggcttctcctagaggagctcaggatgtgggcaaatgcttggtgtgggagccagcatgaggacacttggggtgtggggaggagaccccagcatcagctgcagggggagaagtcacagcggacttggcctgttggttccctggatgaggctttccaggcctccttctttccccatggacccagcgttccatcccctctcgttcctcacccatctccacgtggattggagtacttttcttcccgtttgctcacttagtcctcacagctaccctgggatggaatcagggtaggagctctgccccaccattttaccgagaatcgttcttgctttaatatgtggctgtggtggaaagagaagctttgttgtcgcatagacctaggcctgattcttagctttgccactttctggctgggccaccttgggcaacttgcctcgcctctcagagccccggttgccttgtctttgaatgggggtagtgagggggtggttatcagtgtgtgccacggcctggctcagagccggtgtagagaagcccttggtctttgtggtggacgtggctggctcctgcatgcagtgggcctgggacatctggggtggcttactgtgtccttttccctgcccaggtgctggttgccgaggagaacgtggacttccgcatccacgtggagaaccagacgcgggctcgggacgatgtgagccgtaagcagctgcggctgtaccagctctacagccggaccagtgggaaacacatccaggtcctgggccgcaggatcagtgcccgcggcgaggatggggacaagtatggtatgtgccaaccctctcctcctactccgtgtacccgtgtacatgtccttcctggcctcagagacctcaagttcaaatgccagccttgctgctcctggctgtgtgatcttggacctggcactgaccctttctgggtctgtttcctgatctataaaatggggatgcaatagtgaatccttgagagcattgtcaggagtactaactgaagatgtgaatgaaaagttctttggccggtaaatgccccataagtcgcatttgctgtggtatcagtggcttgcctgggatggcctaaagcaggtggctgttcccatgccaccactcaccagccccaggttcagccacttcaaggggcaggagcctcgaggtgatgcttttaggaagctgctggtggtgaaaatcagcctagtgtgtgtgttatgtgcgcgtgtgcatatgggtgctttgagcttgagcctgtgcacctgtgatatgtggcactcattaacaccttgggccatggtcctgttgacctgcccttgaccctggaactgcccaaccctcctggagtacttgggaactcaccccgctcccctgcctatgctgcctctgcaatggctgggaggagtgagacatcccaagcccctggtccacaaaggtgctcagcagtgagtgaaacaggcagcgctccgccttcccagagcttggagggcctctggcctagacagacactgagcaaataccacgcagattatttatttaaaattgccaggccggaaaagcggagactgctgcgaggcctcctggtccttgccactcactgggaaagcacctgcccccacccattcctgccttctcaggcccaggttctaggagatggcccaggccccagccttgggcctggggatctggggccgtggtcctgtgtgtggggccaaacctgccagcctgagcgtttttgggacgatgccccgcctgcctgccaaccctgcccgttgcagtcaggacgtgacaacaagacaaataatttcttggaccttttatcttggacaccatttattttccctcagccccggggcaggactgacctcatggtagggcccaagcgtggcagctgcaccgtcactgggggctgggccaggccaggccaggctgggcagggctgagccatgctgggcttgtgcacctccgggccagctgcctcccttctcccaggcatcactctttaccgcctccgttcccctcccactctctttccccttcttcctttcgcagcttttccccgttccccgttttgtttttgtccacctctctgtccccctccccaccagctctgtctccctccttcggaccacagcttccctcctccccacctctcccaggccctctgctggctgcctctatggggcctcccatccctcgtggccccctccacagacgcctggctgtgctaggctgacccaggtggtggttttccctcggatctgctgtccagtggctgccagaaggggcagctggctggccgtggcaggaggaggtgcccttctggggagtcccagagctctcattggcccctccaggctgggagagtacaggggggtcagactctggtctgaaccatctgtccacgccctgagacaggaggcgggagctcgagagggaggggagcctggaaatggccggcccctcaccccagaagtcacttgccctctcattccctctgcctgaactgggaactcagggaatctttcctgctgtgtgacctcagacaagcactttgccttctctgggccttggtttctcctctgcacaatggttgggctaacgcagtgcttcttctttttcttttctttttttttttttttttgagacagtgtcttgctctgttgcccaggctggagtggtgcagtggcatgatctcggctcactgcaacctctgcctcctgggttcaagcgattctcctgcctcagcctcccgagaagctgggattacaggcgcccaccaccacgcctggctaatttttgtatttttaatagagacggggtttcgccatgttggccagggtggtcttgaactcttgacctcaggtgatccacccgccttggcctcccaaagtgctgggattacaggtgtgagcatggccgcgcccggccatgcttcttaagtgtaacatgggtgtgaccacggagggatcctgtccaaatgcccatgttggttcagtgggtctcgggggcgaggcctgagctgctgcatctgacaagtgcctgggcggggccagtgggcagcacttccagtacctggggactaggccttcttggcttctctgccagcaccacgctttctaagattttatgatcctctctcaaggaatatgtttctgtactcctccgaccccccgacacccagggcagtgcagggccttgctggctgctgctgctccatttaaatgccacattagaaacacagatgaggccaagggaccccatctgtgagcccggggagaggaagtgagacaatggagccaattgaggcttccaatctagataatcaatacaaatattattgggagggtgatttatgtggccaagccagggcaggaggatgggcctgctctgctgatctgcattaggggcctgccttgtctcagggggaggggctgccagagcacccaggacagttcaggaacctgctcccactgagaatgatgcaatctgagatgtaccacacactttgtcagaatcgtaagattttataacatgcagtctcagagtctcagcaaacaccatggatacatccccgtaaacacctggaatctggaatccccacggacactcagaacctcagatttgcctctgtaaaggccagaatcctgaggtgctggctctgtgggtgggcacgaggggctgggtgccctgcccagggctcttggcctgctgcgcagtagtgggtggtcccttagtgaaatctgcttggatgtcagtggggcttctgcaccttggtattctgcaagagggtctcccggtggccctctaaagctctcccagtactgaaaagctttaggggttctgagagtgggccgctccaggaataagggactttcttagccttgccttgggttctggagggagagcacagctggccagagggctggaggcttaggtagttgaatacctggcaggtgggaggttgtgggggaggggcaccctgcccacctgggataatatcagcctcccctcttcttgccgttggtgctggacactctgtcctgcaggcagttgccatgtcatagaacagcactggaacaggaagcaggacactgagttccagctgcagctctgccagggagcatcttgcagggctggggaagagcctccatgtctgggcttagcttctttatctgccaagtggggaggagaaggcctcctccacctgcccttgaggtggatgtccctaagcctgggatgtgacgagatggggaaggcaccaactcctcagaaggagagggggccagctgagcccacacgcagggagactctagcatcggggggtttccggggcaactctgcttttaaagtttaggaaaccttatgattggatattcctgcctgattttatttgaaaaaaagatttctctgtttgagaaaaaaaaatgattaaaaaaccccattttgcggtaggccagcctccagactgacagtgcccagaataaccctgggcaggccagctagagtggccctgctagccagggagatggtatttggaggattgagcttgtcagctcaggaatctaatgggatttgaatctcggctccaccactttcgagtgggagaccgtggatctgagttagcctttctgatcctgtttcctcttctacaaacagggaaattgaaatgagagaatcttatgcccaaagattatatgatcattaaaccagtactaataatcaccacctgacctccttactatgggtgtgtgggggggggtggtgccatcgcgggctcaggtgaggaactgccatcaggtactggctccagaggcttccagaaaggacctgagggaagaagcggtactcctgtctgctgtcagtgggacctggcaggttagatgcaggtagaagagtcgtcctcccgtgattcccagcagcaaggtctctgccccagtgagggaggagggcctttggctcccctgattgcgtgtgtctcccctcagtcccttattcattcaacgtaaattaccaagcccaagcaccaggggagggggctactgtggtgagtgacatgcctcgtcccagccatcaaagagccttcagtctagggcccccattccttactagaggctgactttgagtaggaagaacctaggctgtgaacttcccacgtgactgtgagcccacccattctctccctgagcctcggtttccccacctgtaatgtgggtggggtaaagggtgtgcagctggtactttgcagcttcctccagctcaggcatggggttagtctgtgattccagctttacagggagtcagcacgccccagtgcagatgcttctctgagcccccaggctgggtacagagccccagagcccctgtgcttgcccttgtcccaacaagggtcctgctgcggtggaaccatctgttgacgtggctggtgcccctgcgagagtgtgagctccttggagggagtgactttgtcttgctctttgccatgtctccatgtccagcacaaggcctggcagagagcagggcccctttaaatgtggctagaaggatgcataaaatatgtacagggcaactcaaagtgtaaccgggggctgccgtcagtggctcacacagggaggaaggtcggggcttcagggctattgctgagttggtggtggagctgggagggagtcctctcgtccccatttccctccttctggtagttgccagaggtcctttgggctggttgagtggctgacgtagcagggacccctagtctcagagttgagcccccacggtccattttccacacgcatcccaaaatgtgagcatgttcctgcacagctcagaggtgctcatctcacttagagtaaaactcatgtccttgaatcggcctgcaggcctggcgtgcctggctcctgatcctgctgcagcctcaggctctgcctctgctccttgcttacatggccacagccacagcagccttccgggcatcccgtgaacacccaagcactgtccgtctgcgggcctttgcatttgctgtcctgagaatgctcttctcccagatatccccatggcccgctccctcacccacccaggcttctgtacgattgtctccttatcagagagtccccagctctgtccacccttcctagcacttgtcgctatccgacctgctgttatatatttagttacccactatctgtctcccgtgttagagtgtaaacttctggagggtggaggttttgtctgttttgctcactgttgcatccccagtacacagggccaaccacgaagacgctctcagtatatgcttgagcaagtgaatgtatgggtgatgccctgtgtgtgtcagggtatgtggcaggtgtccttccccctggcgcattgaggcaaagaggcttccttctgtttggcacagatctcagtgcacagtaggtacttggcaaatcagtgttccctccctcctttcccaccacccttcctttctatccggccaggcttgcactgtgcagtggggatagggtgatcatcagacccagcttcccccagcaggtctcccagctgggaatggaacttcctatctccacctaaacccctgcccctctgagctcatgtcccacaacttctgtccccagggaggagtgaccacccacacctcaccaaccccttgactgacacggctatgctagagctacagctagggttaaacagagctcccgatgaaccctattggtttttccccccaactttctggtgtgtccatatggagaaaggtctttgagaaaagaccatatacagcagagtgtgtgtgtgtgcctgggtgtgtgtgttacagtgacagggaagcgtctccagaaaggataccttctcctccattgccacctctctctccccctctcaagatctggtctgccttcagtggggaaggagggagggctgactcggtgtgacctctcagtgctgtctgtagtgaggatggttcttcactgggggaagacgcctggagagcagccagcagctctgtcagcactgggatctttgcggctggccagctaccgtccagccctcgcagggccccagatcggaggcccagcccctccctggctcccagctcccctgctgctcttgcgggtcttggggactttaccccaggcttggggaaaacaaacccaccctccagctttgttctcttgggttctgcctctttgggtcttgtcccctgcatctgtgggattcaactctgtctctgtgctgtgtctctctccaggcctctggctgcctctctgagtctttccctgctgtttcccacccttcaaacccaaagtcttcacagcgaggccccggatcaccctctgggaaacccggctggggaagcacactgggattagtcaaccaatcaatcagtcagtcaatgccacttcccttttctgtcatcaccagcctgcgtaaggtctgtcctctgtctgcctgcgtaccttggtctgaatctccatctgtctcaaactggctctggccttgctctgcctgtgttcaaatcctggtcctactgtgagactctggtcaagcaatttaactgctctattaacttacactgattcagtttcttcatctgtaaaatggcataatagttcctacctcatagggctgttgtgatggtcaaatgagatattccacattcacacactttttttttttttagatggagtctcgccctatagcccaggctggagtgcagtggtgcaatctcggctcattgcaacctctgcctccaaggttcaagtgattctcctgcctcagcctcccaagtagctgggattacaggcatgtgccaccacacccagctaattttttttatttttattagagacagggtttcaccacgtcggtcaggctgctctcgaactcctgacctcaggtgatgtgcccaccttggcctcccaaagtgctggggttacgggcatgagtgcccggccccacgttcacactcttaacatcttaacattgcttgacacatggtatatgctcagataagtattcactgttatcatcatttttttttttttttttttttttttttttttagcagagacagggtttcaccgtgttagccaggatggtctcgattcctgatcttgtgatccacccaccttggcctcccaaagtgctgggattacaggcgtgagccaccgcgcctggcctgttatcatcattctttagtcatttttgctgcaggcattaaagtggggagagacaacatgagttttttgtagaaagagttttgtctccagctcccttcctgcactctttccccctttgctgctctcctttctggatgccggagaagggagcagatcctttgagccatttttctttctgccactctccttggccccagccctgggtggcctctgggctcctgctctgtgcggagccctggggagacaggctctgtgggccttccttccggggcagctgtggcctggagcttcccattttgtattcctcctcttgtttcatgcagccttttctcctcttcatcagatctgaaaccttctttgcctctctctggctgtggtcgcagcccagccctgggtggtcctgagggtttcccatctcccggtatcaaaggtatctttctcagggtgaccctggggactccctccttcctcaaagtcatttggaagtggagctgagggaaggtggacatccccatccactaacttctgcccaaagaaagtggggtcaaagagaagacctcccctgcctccttcgctgttcactcactcgctccccaggaaagggactggggcctctgagaagtgaggggtggggtagacaggcaaagcccaagacttctgggtcagactgcctgggcttggatctcagctccatcactgtgtgactgtgggactcggttttctcacctgtaaattggggataataacaatagttctaacctcctgggatggtggtaagaattaaatgagataatgcatgtaaggtagttaggacaatgcccagcacatcataagctctaaagaaatgtcagttactgatactttccataggggcagaactgaaagaggcctcagaggttacctagatctggcccagaagggaaaaggtctttcgctgtgtcactgaggctggggatgggtgggtgggagcccatggttcttgcaagtggcaccgagagtcgcaccaggaaggcgcacagtggtgaagggcactgaccatggaatcagacgctggactcagaccttaccctgctcttcccagccatgtgactcaggcaagccacttcacctccctgaatttcattttcattagccagtgaatggtgttagtcatctccacaccacaaggctgttgatgagcttattaaaactggcttactggtcgctcactctgagccgggcgtgggataggcgctggaagtcagagtggtgataagacagataggttcttgtcctcgtggagcttactttctgctgggtggagaccgacaataaaaataagagtttcggagaagagctctcaggaaaatggagcaggggaatggggtagggctggactggggagggtgctgccagcattagacatcatggtctgggaaggcctctctgaggggcaatatttgcaccacaacctaggagatgaggagccactctggaagctctgggcaaagcagcctccaggcagaggaacgacatgtgcaaaagccctgtggtgggagcgtgcttggtgtgctagaggggagaggcaaggaagggaggcagggctggtccacagggtccaggctgtgtgccctttgcgggtcccattgaagagtttacatgttcttctatgtgggttggggatccctaggaggtctttagcagagaagggacacaactaaatttatatattttttgttgtatgttttgagatggagtctcactctttcgcccaggctggagtgcagtggcatgatctcggctcactgcaaactctgcctcctgggttcaagtgattctcctgcctcagccttctgagtagctgggactacaggtgtgcgccacaatgcccggctaatttttgtggtttttttttttagtagagatggggtttcatcatgttggccaggctggtgtcgaactcctgacctcaggtgatccacccgccttggcctcccaaagtgctaggattacaggcatgagccacagcgcctggcaaatttatatttttaaaggatttctctggctgtggtgtagaggagagatggatgggggtgagagtggcaaggggaaggggctgttgagttgtgcaggctggaggggacggtggcccggccagggcagtgaggaagtctgatgagcagggtgagataatgtcatcaactcctccgcctggcctggtgcaggccccacaaatggagctgtgcctgagcccggatgaggtttccagctcttgagagcagcatcctgggggcttgggtcatgggagtggatgcgtgatgctgaggacctggcctgggtggtgtctctctcttctccttctcctgtctctctctctctgtctcattttctctctccctctctctctttctctgagaactgctgctgctattactccccaaagactttacataattctggcccggctccctcctcatgatgtcatgtgctgagtggagtctaggtcactccatcgcatgctgcggtcggggagagaacagacttctggctcccctggcgtgacggccaggcgcagaccctccccatgctggggtgggggtggctaggcttgtggtgggtggaggtgcaacctctgccccaggccctttggacagctcaggcaaaggccagggcttcctgcggtggccctggctggtgaggggtgggggttgtgctgggaggcctgtccctccagacctgggggcctctcccctggagcccaggccccagtagaaagaggcaggcagtcctgaggtcagtccctgttactgggtgctgctctgaacctaagtttcctacactgtaaaatggggacaaagacacccaatctcaggatggatggcttcagtgcactgtaaggggagcatagcaggaactgttctgaggacagaggtccaggcgtgtgctgggaagggccaagagggagtctctcccttgggcctacttggggttgtctgggccccagctcagtggctttacctacttcctgcatctcccatccctgcccctctgctagaccccacttcctaatcccaaggagaaggagagtagggtcgagcccctcccccttgcacaggtagggaaactgaggctcagagtggggtatggcttactcaaggtcacatagcctaggacggcaatgccagaatgaaactagacccggtgagccccagccccaggcattttctggtccattttgcagtgtgggatgtctgcagccctcaaggatgctgggaagttcaggtcatagtgcaagacctggggagggaagctttgctgctcctccacccttgcagacacatccgatatccttccactatattttcgtttttcttttcttttgggaaaacagtttggtttttgcagtttgtaggaaacttaaacaacatttactgagttttccctccctgagaacagagtgctaagctcttcacagcatcattttgtataatcctcccaataactattgaagattatacccccattttacaggagaagaaactgagggccacagtcatacagttggggccagggattcatatccagatttgtgcaccccaaagctctcaccttttcccctcatcagaagcacctgaaattgtcctgattcccccataactcctcaccccctgtggggcctgatctttacgaagagatggagaaagcaagtttcagagctgctgtgatgtttggccctggggagggagctcacagaggaaatgacggagtttgacttaaggggaacaaggaggatcaagggcttgtgcccaccgccatctcagcgttggttaatatccctgagtcagtgttgactagggctggggggaggtggagagaagaatgtgcctccccctgtttctagagttactaaattcttgttagatctttaaattttatgtaaattcttctttttttccctcttggaaaggtgggtatcgtattttaattagtagtggtgtcaaaggagggctagattaattattggaaatctcaagttccagatggttttaattttcacagcagggcaccagggtctatatttgtaaatttttttattaaaatcatacctagtgtattttaggggcactgaggtatactctttgtggctccaaggatactgtactcaggaatttggggctatgatttttgttatggagaagcaagtcccttgtcactgaaattaaacttttgtgggtgagggaggggcaggggctaggaagcaaggggtcagggaaaagagtgcacgaattgggagtggggcggtcacaggcaaataaagcagctggtactggggagtcaggcacagcggtttaagaccagagaggagagagagctaagagagggcgcgtggcctacccaaagtcacgcagcagcgtactggggagaaaaatgtgggctggtggagtgagaggaaaagatttggacacagcatacctaatcaagggacagtcactctttgcctgcttgatgtccttgttcaggcagggctttgggggatcagctctggacccctcatcctgagggaggctctgtggagcatggatggtgtagcatggggtctcccaccctggggggaatcccagtggggatccggtcctgattgggatttctgggctcctgggagttagttacccttcagctttggtggcctccatggacggcagtggaatatcctgcataccctttcctagggagctcgcacctcactccctgtgcccttcctgctatgaataggcaggttaaaggtgccgggggcactagcaggggctccagatgtttgccctgcaggaaggggccacagacctaacttttggaggaaatagcttgacgtcctgaaaggcaggggaggtgtgcgtgcacatgcctgcatctgtatctatctgtccccttggtccccttagctacttctctgtggttatttgtatggcatctgtcctgatttggggaatggggttatttttgtgattgtctgtcttgctttgggtttgggggatggggttatttgcatggccgcctgtcctgcttgggagaatggcctttttgtatggccgtctgtcctgctttgggaaatgggttttttgcacggttctttgtcctgtttggtggaatagagttgaggggctagggaaggtgggtgacgatgggtagaagggcacactggtgttcagccacagggggcagaactcccttctggctggagccatctggatcccaagtggagccaagagaggctggaggaaagggaacaggtgataggcagcttccatctccctgcctgaggggcaggggacagctacttctctgacttctctgtggttatttaggcatctgtcctgtgggacttgttaggcctccccatgcctgattttgggggagtgagggaccaaagataggaccagggaccatgtcactgagcctttagaccaagccattgcccctggtaataaaatgtgtcttgttctccttctgcctttcgaagcccagctcctagtggagacagacaccttcggtagtcaagtccggatcaagggcaaggagacggaattctacctgtgcatgaaccgcaaaggcaagctcgtggggaaggtgagtgatggtttgggattcccgggaacttcgggttcccctctggcagctctgggagctggaacaatgtgtccagggcactgtcagtcccaaatggaaaacaggccgtgtgtgtgtgtgtgtgtgtgtgtgtgtgtgtgtgtgtgtgagagagagagagagagagagagacaggagagagagagagagactgtaatctcttcctttcaccccatcccatcccccacttctcttccccgggcacttgaactcaccaggctgaggtatccatggctgtgtctctcctgttgggtgtggagctctggcttgcttggtagtgggagaatccttgaggggctctggggcaccccggctacatgtccctgacgtctgggagcaaggaaccggcaggccaagggctgtggctgcatcgatcgttttaacaattgccaggggcttaccgtcctgcagcagtgacctctggaacctggccgcctcgtcagcgctgggcctcttggttctagcatttcagaaagattttattactttgaaactggcaagagagctgcatttaacaaattagggtgggggcaggagtgggggtgcaggttggggggaccctcgggttggggagacccacgtgtgtggggatctgagtctccaatgatgctgcttctcagcacccctgttcgtttcctgggtgcgcttgtttgcaaaagtcatgaactggcttcctctgggtgttccaatggaaggtgttatccacaggagctctatggtagggtcaggttctctgtccccttctctctgcagggactgactcccatatgcagtttgtacaaccagggttgagggggttttgcctggacaggtggagtggggtggagggtaggcctggattctaagggggatgggcttgtgcttgggggcaatgccctggctgattatttgcggttcattacatcttgttgggggtgggggagatgacttcagtcttgctgaagccatgtttttgattttttgaatcccccaagtcttatccctctccctttcccccataccaagaggctggggaggatgtaacaggccagagatcccagccagggcattgtcgcattattttgttaataattactgtcataatagcttccgctaattgagcactgactttctgcccggcactgaactgaaacgctcccagtgaatcccaggaggctgccaccgctaccatccccattccacagatgaggaagccgaggcttggccacgcccgggcacttgtcccaggtcccacactacagctcggcgggattcaaagcccggtttggaaggaaaagattccagccgcactgcccacaccaactgaggcttctcaaagagcaaaataatagtaatccgcagagcgcggctccgggatgccgaggagtggttttaattagtgattcactttccgccgttgcgaggctggccggccggcgaggggggtcggggccggggccggggccacggactggggcgcgggcgccgggtccccctagcctggccggtccccctggcctggccggtcgtttcctgtggcggcgcggcccagccccgcgtcaggcgctttgttctcctgcccgcctgggccgcctcccaggcccaacctgctttgagttttcggctcgtttttctttctcccccagcaggggccagcggcacccgccagtgcccgtgcccacgccgcggcccgccctcgccgtctgcgtgctgttcccggcatcttgaccccaggagggctgcgcgggggtcaaaagagcagccccgtcccctcgggccgcccccccaccccgccgccggccgcctcccgcccgcgggcgagccgctgagtcaccgcttccacaggagccggctccgatttcctgccccctcgccctctctcccgtcattaatattggtgacggttcagctggcgcggcgcaccctggcgcagcggagggaggcccggccccggcccccggcgcctcccccgctcccgcccaggcctccacgcccgaccccaacccttgccagcctcctgtcttctgggcccacccgggggactcgaggacgccaccaaatccacctgtccaggcttgacctctgccccgcccagcgccccctcgctctctggcccccgaggcgggaatctggctcctgggctgcggtcctctccacagcctccctgcccagtcgtaccttaggccctgggtgtcccctcctgccctaacccctgccaccgcctctgttctggcctcctaccatcccggaaatcgttgccccagccgcctggcgtgtggcttctgcatctccaggcctttccccgctgcccaccttcggctttctacagcacatacggcattggagggcggcacatgacctgccctccacccccacccagctccaaacccatccatgggtcctcccaccttgctatgggacaccgaaggccctggggagcctccccgggcacatggattccttatgctccagatgcgtggcactgagcaccgctgttccatggacggggccttcgggcactgtccatgctgtgccctctgccgggactgcccttccctctgtccacttgccctgagtcctggctggtcattccctgacccctctgtcagcccacccaccccggagccccacagtccctcgcacagccctctgttgcctgtctgctaacctgggttgtcactgtttgtctttgtgcctgcatcctctgtcacactgggaactccctgagggcggattctgcatccattcatctgagttctgtgtacctggccaaagggctccgggggcaccaaagaaatagaaacatggttcctgctgtctgtggattgactcttaagctacagcctgaattattcacatcaacccaagggagtctaagcgccctggccttgctgagcctcagcgtcgtcatctgtaaaatgggaatgataatctgggcacttagtaagcaggtaggcacttgctaagtgttagtccctttcccctttggagccaggtcacgaggtcacttcttcacctgtgggaacgcctggtctcagctccagtgccaactcctttggagtggctcaatggggcagcttccttgggccatctgtgtgccaaccctgcacatctctggccacagcaagggtacctgcattgagcccttgacagagctttccagaggttgcaggcccttgctggagttactctttctgctgcattgtaccaatcagatgccaaagctgtgtccccagcccctgcatgttcaggcggccccccttctccttgctaccctctggaacccatgtcacctggcccaggaggtggcgcttcctttcattttgtaaacagttgttgagtgtctagcatgatgtgctaggcatttttttccccatctctggagacgcaacccagattgtatttttctcatctgccaccacctattgcgatcactgatgagtcctttttggggcaacatagagccacagaccttttcagggcaggggagtgctctgcccaccagcacatctttgttaagatggctttggttgcaaatggctgaaacttaacctaaaatgccttaagcaaaaagggaatacggggcttatatagcaaacaacaacaacaaaaaccaacagtccagggggtagttctagtttcaggtaagactggatctaggggccagatgaggtcatcaggattccgtcttcagatcaaatggaaggactagggctccagtttgggaagcaagaggttggaggtggtagtaggaaagagatcaaattctgctacatcatcagggttctgggatggaatattcacttactctctacatactgatgcttctgccttgcctgaaccaattaagtcagagtttccgggggtcgggcccaagcacaggtgtttttgtttttggagtctctgctgtggtgagcagggtcatagaggtagccaggagcagaggcaagcgtcaagcccggatgtagcctgctgttagcttcttatccatttttgcctgaggtcacgcaggggaacttgtgatcatcatagccccagggctggttcccaagattcgtgaatttcagcccaaagcctagctcttcagcccttttaagtaaacccagacatgcattgagcccgcgtgactggcactgggtagctccttgtacatccaaaacctcgctttgtgccaatggtggctatgtgggcctgggggaggcgagatgttttgatgggcagcacctgctcctcacctttcccccttgtggacctctttggaactgggcagaggagaagtgagctgcagtggctagggcaggttcaaatcccagctctgccacttagaatctccatgaccctgggcaaggccgatttgcttctgagctctgctttcttctaccaagcagagctgaagaagaggatgaaatgcagtaatggaagtagcaatgtttggcctgtagttggcaatcaataaatggttaatgactgagtagggagaccaagtgtgcgagacaatttctagggctcagcttgctttgtctccctaatcagtgtgtctcaggagggacctctcatagcttctgcttgtctctgggacatttataacagatccaggagggagagtctgttttcttcaggaggaaacccctttcatgtgtcatcccaccgtttccatcctaatgaaaatgcgttcaaccccaaatgctcggggcacccctgtcttgagctaagacctgtgctcagcaacaagagaactgagaagcagccctgacctcagcaggcacttgggctaatgcggaggcaggcagatatggaatttctctgttggggcatggggaggagaaatggggttcagaagatggagtatgtgagcccattaaggcttgacgcttgaatggagtcttgaatgaggaagaagaattgtccagggagataaagggaagtcctggaaggcttcccagaggaggcagtttttgagctgagcctggagggatgaaagccattttccaggcagtggcaggtattctaggatgggggagcatcatggtgtagcctttgttctgtttgctccaactatttggttgagaccaggcaaagaacctggattcaggttgcacacacagcttccagaattttccatggggtacccagagcccagggaccactcctctccacctgccttgcacacttaccctggctttcctcacagtagaccttcgctgctcacgccacccatactgtcctctgggtcccacgtgtgtgtcccaggtctgcccatgcctgttctgcagcctcctcgaaagatctcatcttccagagagtgttttcttaccctgcctgtccctttctgcaaagttcagcactttgtctggagggcccaagcttgccctctgctcaaaggtgaacgttcctggaagctccagcctgttttccacttcaaacaaaaggctggaactcgcacctcagtctccacacacagccagaccgctgggcttccagcttggctgggcatccgtccgtaacgaggagtgggcccggcctaaatttggagatgttagttggaaactcaagtgctgctaattcaggccttccaactttgtgtttcccactcttccccatcgagcaattcggctgtctcagagaggagactaacaccctgcctcctcaccaccccctgtccagatcagatccaaggaaggcacgccagccctgtcgggaacagctgccgttcaggaataatctagcaagctcctactgtgtgtcagattcatttataagcatcactcctacagtgtctctatgatgcaggagtcattgttcccattaggtaggtgaggaatttgaggtttacagagtgggactgactggcctgaggttacacaagggaagtgttagaggtcgtttgttttctgactccaaatctagtgctccttgtccagcagacccaggctcccaagggagttcacacatcggcccaggagcctgagatcccacaaccgacggcacagtttggagtttggccatgcgaaatctcttatttttggaggccccacctttcttcataccaagtattaaaatgcaccacatcccacatgacatgtaatttgtatttaactagatcacagtggagttgagttacagctgagtagctgatttaatgtcaggttttatgcaaatctatcaggactcatttctgttgtaagcgatagaacacagtatcacctgttttaaaggaaacgaaccatcattggcccacataaccgtgaggtaatgtgagcttcagacgtggctggatctagagcccaaatgatgtgaccaggacgtagtttctgtccttctctcctccttggctttgcttcatctgtgctggcttcactgtcagacaggatctcccctcatggtgataaagtggctgcctctgcttcagccttacaaactcctctggtttaaatccacctatgtttggggttgcctagaaaaggtctcaaggaacactgattggatggcttgggtcacttgctcacctgtgagccaatcactgaagccacagggaaaatagtgtctggatgtcttgctctggtagggatgaagtggagccattgggctatctgggtggagagtggggaaggaatagatttctgaatgacaatgggagtctgttacctaattggagggtgggggaaagatgcaggggccagtaacaaaagtttactccacagatccaggaagtgaaggctctctgtcctatgctgccccagccacagcctcctgcccatgccccttgtacctgctgtctcctctctctcctcctaacaaagagtcttcactcggccaaactagagtcaggctcctgaaccttctcttatgcccatctgtgcacttctttgtaaaatccagttttagcaagagccctgctaagtcagtttagcaaggatcccccactcttgatatatgatcagggtcctcatcctcctccatccctcaggtgatgtctggtcaccctggcctgtcctcagcaaagtctctgttaggtggctttagccagaatcccctacaccctcgatgtttcctcttagtcattttccactctgctccttggctataaacccccacctgcctgtgccatattcagagttaagctcaatctctctcccccactgcaaaacttcattacagttgtccctacaacaatcgcaatggtcctgaataaaaccttcctcgctgtgctttggcaagcataactgagtcatttttttcttgaacactccccctctctcccctgcagcccgatggcaccagcaaggagtgtgtgttcatcgagaaggttctggagaacaactacacggccctgatgtcggctaagtactccggctggtacgtgggcttcaccaagaaggggcggccgcggaagggccccaagacccgggagaaccagcaggacgtgcatttcatgaagcgctaccccaaggggcagccggagcttcagaagcccttcaagtacacgacggtgaccaagaggtcccgtcggatccggcccacacaccctgcctaggccaccccgccgcggcccctcaggtcgccctggccacactcacactcccagaaaactgcatcagaggaatatttttacatgaaaaataaggaagaagctctatttttgtacattgtgtttaaaagaagacaaaaactgaaccaaaactcttggggggaggggtgataaggattttattgttgacttgaaacccccgatgacaaaagactcacgcaaagggactgtagtcaacccacaggtgcttgtctctctctaggaacagacaactctaaactcgtccccagaggaggacttgaatgaggaaaccaacactttgagaaaccaaagtcctttttcccaaaggttctgaaaggaaaaaaaaaaaaaacaaaaaaaaagaaaaacaaagagaaagtagtactccgcccaccaacaaactccccctaactttcccaatcctctgttcctgccccaaactccaacaaaaatcgctctctggtttgcagtcatttatttattgtccgctgcaagctgccccgagacaccgcgcagggaaggcgtgcccctgggaattctccgcgcctcgacctcccgacgacagacgcctcgtccaatcatggtgaccctgccttgctcgcagttctggaggatgctgctatcgaccttccgtgactcacgtgacctagtacaccaatgataagggaatattttaaaaccagctatattatatatattatatatatataagctatttatttcacctctctgtatattgcagtttcatgaaccaagtattactgcctcaacaattaaaaacaacagacaaattatttaaaaaaccatgaggcgagtggtggctggtggctggtggcagggcgggggcagggtggcctctgtgtctcatgctttctggttggtctgtggtctttgcactgagagctagggccttgcacattcattcattcattcattcattcattcattcattctttgaattcaacattactatgcaccaggcgctgagaaggcagccttagaacagatggaaatccttgctttccgggagattccattctaatgggtcattgattcagtggcctcttcagtcatttgttcatatgcatttactcgtacctctcatgtgccaaggctcgattctcgaccctggggatttatccaagaacatggaagaaaatcccagccctcagggaacttcacttctagtaattcattgattcattgcttcatttgctcatttcttgatggatttatccattcaatatatatttcttaggcacttactaagcgccaggcactcttctaggtactggaaattcatcaaagaataaaacagacaagaaatcatgcctgtcagagcttgcagtctagggattaattgagtcacttgtgtcttccacatcagtgttttgccaggcacaggttgaaccagggaatatggtgggaggatctagatcagtttgggacctggcgtgtctgtcctcaaactcccatgggctggagcttgaggaatctggtgatgttaccttccaagtacccatccttcaacgtcttatttcccagggcctgtcccaggatgtcagggagaggccaggttaatctcgggattgaggcagattgaagattattgagtcctctgccctgagatttgggctgtgtgagcagtcaggcttcaagtgggggactgtttctgtttcttcccctccccatggcctccaacctaagtgtctttgtggggcaaaccatgtattcctggtggggcaggaggtagcctgaggcagaaggcacctctgctgctggggtcctgtggctgtcacctgcctcccttgaaaactaccccccagggctggtcaggagaggtccccatgagaccctaaggagaggtgggggcagaggcagtggggaggggtaggagtgccttctctgcaggttcctggctggagttggcattccacttcttccgagcgcagctcttggtcttgccctcgctctctgcgtcatgaaacctcatcacttcacccctgggccctgtcccgcatgtctgtggcttgccctcctgtccatcacagcacatttctgtagagttttgtgaagctctttagctgcgcatctcatggtgttctcaggatgcctttattatccccattttatagatgaggagactgagtctcaataacagtaagccacttctccaagatcacagaataagaaagtggttgaacctgtgtccaaatcttagcttctccaggatggcgacggctgccacttggagagtgcctaccattgtcggaacccctgctggaggcttcagtaggggcgctgcctgggtatccatcagacaactctgtgtgggaggtgggtatccctgcgtgggaggtgggcacccctgcttccacactggacagagactccaagagagtatcagcttgccctaggcttcacagtgaacagacgacagcctgagactctggctgataatcacagtgattcaggttgtcatcgatggagcacctgttacatgtcagctgtgttcactcttcctgtattattttatttaatggaaacaataaccctaagagatgggtgttgctagaaaattgtggagccagaatgcaatcagtcatctgctcattcatccaaaaagtatttattgactttactttgtgcctgacactgtcccaggggctggagatacagcagtgaactgcacagagccctggtcctcatggggcttccattctattagggaaggtcagtaataaaacagatacaaaatataacagcagggagtggcaaatcataagaaaaaaataaaacatggtgaggggatagaggatgctattttagatggggtagtcaggggaggcttctggatgggggatttttgagcaggaaggaagcaagggaagagtgttccacagagagtaccacagcctggagggctgtcgtgggatgaagaggggccagaacggctggaacagagtgggtggggttggggggagaattggagggggcagatcacgacctgagcttttatttggagtgagatgaggagccacatgtgatgtgccttacacctagagggattgctctggttaccgtgtggaggatgggcagcacctaacccggctgcccagcgccagagcctgggctctcactctgacccgatgctgcctcctgcccctggctttgatgcacccctggccccagcacagcccaggcctctgtcctgggtctgcaggctgcttgcacctcctgtaccaaagaccttgcctttgctccatccctgggggcagtgggaccagcgttctttccttgtcctgccttttagcgtccctgatgttggaagatgtgggcccagcttttgtttcctctagacagaactttctggacatttcctgagctatgagtatgttgatgataagcacagtggactggggggcacttttcccagccacagatgctgtctccttaggcacgcttgcttgaggcaggaggctagtgagggttgccatagtccagctgggtaggaaccccagggataacagctatgacttttggaaccttactgtgtaccaagcacagtcctactgggcccaccccaccagcctttgaggtgggcatttttaaccccactttatagagcaggctcagataggtagagtcacttgcttgaagtcaacacagctaataaatagaggagctggggtttgaacccaggcccttctgtctctagagctataacttgacccaagtccagatgcttggagctcttggcatctgtccaggttccagtctttttcccttgaccccctgattctgccttggcatccatcatttcccaacccaccagagggcagaggcaggcgtagaccacattcccaggtgccgatggcagcccttctcccaccctccacaccctccccacgacgtttctgtcataggggccgcagagacatgggacctggagcgcttcagtttgcctttgacgtggccactttgccagctgcgtgaccttgggtaaggcacgtcttttctgtgagtggcgtctctcatcatcccagtcgattctaccttgtggggctaatgtaatgctccagagagagcagagcaaacacctggggacgattcctgccccagaagaggggagaggacccaggcaggggggtttatcctctcatgcttctctctccatctcattgctttagagaggagggagccgagacccagagagaggaagcgacttcctccaggtcctccagtgagttaatgatagagcccattagatgaccaattcataggaatgacagtgggtggggtgagtcgggggccccttcagcggccagccaggcccttcttctcatccttcccaaatttgcagcagagggcagtggggaaggggagggcagtggggagggggagggcagtggggagggggagggcagtggggaggggcagggcagtggggaggggccctcactatccgccccaccagccctataatggtgcaggctgtgagtgaagattgagccttggcaggcaggcaagtatggcaggaagggcccctgaatctgggacagaagtggatttggggacaacggcgctctctccacctccccgaccctgtgcattgtttgcaagggtgctctccccacctcccccatcctgtgcattgtttggacccagagtcttctctccctatggccaccccttgccctcctgctctatgccccccttgatgtaaacacctccagcttctagtgcacggttcctggggcagagtaagctcttgctctcttttcttttctttctttctttctttctttctttctttctttctttctttctttcttttttttttttttttttttttagacagggtctcactctgttgccaagctggagtgcagtggcatgatctcggctcactgcaacctccgcctcccgggttcaagcgattctccagcctcagcctcccgagtagctgggactacaggtggccgccatcacgccgggctaatttttgtatttttagtaaacacggggtttcatcatgttggccaggatggcctccatctcttgacctcatgatccgcctgcctcggcctcccaaagtgctgggattacaggcgtgagccaccgcacttggccagctcttgctctcttagctgttactctgatctcatttgattgacacaagaacctggcaagatagatgttaggatgtgcattttgtagatgggaaaactgaggcctgtagaggaatgtaattggcccaggttccacggtagaaagtgactgagctgagatttgaacccacatctccctgtttccactcttcaccttcccagcattcctctccatccctgcctttgctgggggtggagtggggaataaagttccaaagctgagggccagagaagcaagtggccctaccagggtgggtggggagggcctttcccatgacaagtgggagaggctgtgttttgggagtgtaccaccaacgccagccaggtgagccgcaggtgtggggaggcacagccccaggctgtctgaaggacattgaggggatgccctcctgcctgcctgcccagctggagcctaacaaggcgaggctgggatggcccggggcttgaaagccccataaatggggcagaaccctccctccccagcagcaggattggggcttccaaagaacaatagtgaattaggtgctaaagatgtgaaggctgctccccaaccatgcaattagcttgcaggtctgttacaaacattaggccgccgaactggggaccagatggcggcaaggctcgcccttgctgtcccaagacggcctggcttcctggctgaggtttccagctctggcaaggagggaaggcggcaggtagccccggtgtgtgaccccctgcagagcaagcagccattaatcaggcattccctcccctccctggggcagcttcacgacccaattagcacttgctagaatttctgccctgctcttccagtctcccaggctgaccgccctgcagctgcaggccccgtgtcacccaccctctggggtgggttggaggtgcagccgatttaaaaagactgtcacagacctcagtctctttccagtaccagctttatgggagccttcccccaattctctcacttaattcctaccacaatcctcctggatacttatttttaatctgctccctaccgatgaggaaactggccaacagaagggaggtcacttgcttaaggccatctgtgtgactccccaaatcctgcgcatgactgttatgacacagaacagcgcccccccggcaacccccatgcccaagagttggtgtgactcctgtcttacataaggacggaagaccagagaggcaaggtgacttgctcaaggtcacagttattaagtggtgaagctgggatttgaaaccatgtctatcaggttctagaacctgcttctcctccccttctgcaccttcactcctgttcctgtgctattcgggattcttttagctgcaagtgacagaaacacatgaaaaccgacttaaaccaataaggacatttattggtttatgtaacagaaaagtgcacagccctctggcttcaggcaaagctggatccaggtgctcactctcctctccctgctttctgctgtgttggctttatcctcaggaaggctttccctgctgttctaggcttactaataacttcggcagaaagagaactagtaacttaagaacatatctttcccagaggctccagtaaaagtccctgggtggactctgattggcttaaccctctctcttgcgtactcttacatcagtcactgtgatcagggagacagaatagtttaattgtccaggcttaggacaggggccagtccctggagctgggctggggaagggataagccaattctacccaagtataaggtctgaaagtgggagggggtggcttccccaagaatgtggaagtgttgttaccagaagaaggggtgatcacaaaagaaagagaggtctataccagaggttctcactcaactgtgcctcagttcccaggagagctcgtgaacacacagattgctggggcccacccctacagcttctgcttaaatatctagggtagacccgagaatttgcatttctagcaagttctcaagagatactgatgttgctggtctggggccacagtttgagaaccactgttctgcccccttcttttacactcatgctcccgccttctttgtacagtatggccatacaaggatgtgttctagtcccaggccaagaggcacatggatactgtcatcttagggaatccatgtacatattccaagagctctttcctaacccatctgctgcagaacgcccctctcactggctgtgtttcctcttcccacccactttgcacaatactcttctgcactttacaacggaaaggtacacctcttactggccccgcatttcattgtgtgtgttccctggtgtgtagaaaactccagactatggaatacagggcccatctcagtgtggggaactcccttgaatcctggtgccatgcattcgtggtaagggctcagggcaaaatgcggcccctgttttggcccatgttgagctactctgaattcaggtatattgtacagtcagatggggggaatattgacagtttttcttgagttaccgcgtgtctttcattccccaaatattgtcctggaatgcattcagtattcactactaagggagggtattatgatagcatgagaaatattggcagtagggataactcattcagggacacaaactcatggctacattccatgctgtctctctctctctgactctctcatccatccgtcgtctgtcaatctatttgtccatccacctacctacctacctacctacctacctgctgaccaacaaaatcatctcagaatcacaatgtttaagatttggagacagcatgctgagaacgaggaatgcccggagcattttcttatccatccttccttgctttatatctctgtattttgcccaattctaaagagaaggaggtaaaatgttccaaacttgctgtctactggtcatttttgagtaaatatgatcctgtcttggcgggaagtttgtgttttttattttttatttttttttttgacggagccttgctctatcgcccaggctggagtgcagtggtgcagtggtgcaatctctgttcaatgcgtcctctgcctccccggttcaagcgattccccctccttagcttctcaagtagctgggttgacaggcgtgcatcagtgcactcggctaatttttgtatttttagtacaggcagggttttgccatgttggtcaggctggtctgaaactcctgacctcaggtgacctgcggcctcgacctcccaaagtgctgggattatagacatgagccaccgcgcccagctgaagtttgtgttttatattatcttgaacatttattctgacttgtggggggaatattttcacttaacttgtgctaaaagattactggctactataaatccacattcacttttttaaaacttgggtgtgaatcttattttctctcactcatcactgctcatgtattcattctccatgaatatttatttgatttagatgaacttaattgagtatgagatggattctactaaaaatatatgattttcaaaattatttaaggcagttcatgagtaaaaaattgtgaagagcccagtctagtctaatccgtgattcgatggtctacctgcacgcatagacgcacagcatcaacctagaaaacattctcctgggccctgggagcacagaggtgcctcagtacagtccctcgtgggtatgtcaagaggtagcccttggggagctcacagctgagtgctggaaacaggtggactttgaggcagcaagagaggaaggtggagaggcagaacctaaagctttggatgcacagaggaggtgatgactacctgggaagggggtgagagctgggggtcaggagacttagggaggctgaatagagctttaactgcaaagagaaagagggaagagcagcccaggccaaaggaacagcacgtgtaaaggtggagagaagtaaagttgtatgaaggtttacagaaatgtggcatgacaggagcttgggggtgcaagtggagcttgggagctggaggcaggaagggaaggagatcagatggtcaaggctgttgtgttcctagtcctcatttgtgtgctcacactctgacgctcatccagatgcttacaccaactcaggcctcccctctcttccctccttccttcctacttgcaacattttcttttgttttttgagttggagtttcgctcttgtcgcccaggctggagtgcaatggcgcgacctcggctcaccacaacctctgcctcccgggttcaagcgattctcctgcctcagcctccggagtagctgggattataggcatgcgccaccacacccagctaattttatatttttagtagatacagggtttctccatgttggtcaggctggtcttgaactcctgatctcaggtgatccacccgccttggcctcccaaagtgctgggattacaggcatgagccactgcacctggctacaacattttctttcttttcttttcttatttttttttgagatggagtcttcctctgtcacccaggctggagtgcagtggcaccatcttggctcactgcaacctccatctcccgggttcaagcgattctcctgcctcagcctcccaagtagctgggcttacaggcgcatgtcaccacatccagctaatttttgtatttttagtagagacagggtttcaccgtgttggtgaggctggtcttgaactcctgacctcaggtaatccgcccatctcggcctcccaaagtgctgggattacaggcgtgagccaccatgcctggcctacttgaacattttctaagtgcctattctatactgggttccttggagataaaaaaatgaatctggtacaatctctgctcctacaagtcttgttgaggagacagttaacaatgaccataacttgggataagtgcaacaatgagcaaggagggtacaaagggggagtcagagaaggcttcctggaggaagagacatcaaagacctgaagaatgaggcagaattggcaggaataaaatggggatgagactttctagggagcagcagcaatgtgtgcaaatacgtggttaagagagaacatagcccgtgggaaataaacagaaaaggaactggggaggacttatcatttcgatgtaggagtggcaactttgttagaaaaaaataaagggttggggaaatgttaccggggaattgctttgggtttctggtctactggggatgctcgggccagggctgatggagatgtgtggtggtgggtaccacagcttccttgagcatctcgtgggctgcctcagactcaggcgtggctcagttccacagcaccttggttctgatgatctatgcagccactaaggactgtggcctggatcagtggttctcacctggggcgattttgttccccagggccatttcggcagtgcgtggagacaacgttggttgtctccaactccccagttgtcacaactgggagccgggggactgccactggcatctagtggagagagtccagggacgctgccgaacatcctgcagggcacagcgcagcctcaaccacaaagaattgtctggccccagataccaattgtgccaaagctgaaaaactttggcctaaatccattattacaagaggatggcaaaatggcaattttcaaattctattatctcttcactgtctatttactgggattgtcctaaaaacaagaactttctgccaggcgcagtggctcacgcctgtaatcccagcactttggaaggccgaggagggcggatcacgaggtcaggagatcgagaccatcctggctcacacggtgaaaccccatctctactaaaaatacaaaaaattagctgggcgtggtggtgggcacctgtagtcccagctactcgggaggttgaggcaggagaatggcttgaacccagaaggcagagcttgcagtgagccgagattgtgccactgcactccagcctgggcgacagagtgagattccgtctcaaaaaaaaaaaaaaaaaaaaaaaaaacaagatctttctttccatcaactattcagttaccccaagatacaattcatacaggaaagacaggacaaatgcctgattctttctctttatttaccagtttcagaacattagttaactagcactctccaaagatgaggagtgcattaagtctcactatgaacttttggattttaaacttatttttatttttttgagactgaatcttgctctgtcgcccagcctggagtgcagtgtcatgatctccgctcactgaaacttccacctcccaggttcaagcgattcttgtgcctcagcctcccgagtagctgggatacaggtgcctgccaccatagtcagctaatttttgtatttttagtagagacggggtttcctcatgttggccaggctggtcttgaactcctgacctcaagtgatccacctgtctcggcttcccaaagtgctgggattacagacatgagcgaacgcatccagccagatttttaaacttatttaatgggtttcaatccatagtagttactgttctttttgaaggtcaaatttttcaatttttggccagtgaggactcctgccagtggctcttgtgtctttttatcatcattgcctttgtgctttgatggcttctttgctttctggtgtgaaaagacgtcccacgttgtctcaatgtgttgtacatttcccaaccctgacctgggatcagctctttcttctagggccctggtttaatttagtggagagtgtcaagacttagtgagggttaaaaagagactcaaagaaacccacaaagctggaacctagctttgcacagtgcctagaacacagtgctcatgtaggtcgggcgtggtggctcacgcctgtaatcccagcactttgggaggccgaggcgggcagttcatgaggtcaggggtttgagatcagcctggccaacatagtgaaactccatctcttctaaaaatacaaaaattatctgggtgtgatggtgggtgcctgtaattccagctacttgggaggctgaggcaggataattgcttgaacccgggaggtggaggttgcagtgagtggaggttgcaatgagccgaggttgcagtgagccgagattgtgccactgcactccagcccaggcgacagtgcgagacaacacctcaaaaaaaaaaaaaaagaaaaaaaagaaagaaagagcatagtgctcctgtaatattgtgattatttcaaggacagaagtcaactcatccaagttgcttcaactcccttcttgtcgccgatctctaatgcattaggacacttgctttctgaacctccagacagtctgaggaggggcccaagtgtaatgagggttcaggttagcaaggagagaggtgaaaatagtggctttgtcgggcagagggaactgccagcccacagagcacgtctattagaaatgaagccagggcaaagccagcagaggagaggagcaattagctaattcaggagtcgaggccctgcttttatttccactgacaattttaatcctgtaataacctttgacctaagccccggggcaattagtgcctgcaagtgaagtggtggtgggtttgaacttctgccttcctccccaggctgagtcaatacctctgtattctattacatgtaattgaggtaaaagggtttatttaagctaacaaatgattatttcccacaatagaatctccatcccggttagtgaattggctcttccaggcattccctgttttgtctgcagccaaagcctgtattttattgactgctttgtcctcttctctctttcctcctggcttctctctccctcctcctcccccctcccttgccctcacaattcatttcagcaaattcaatggaactagcattccccgccccccctgcccctccccacccccggcacctaccttgagccaggttcttacatctgagtacagttctggcctatctggaaggatctcacagcctagtgacaaagacagactcgtaagcagatcaattataaattatactgtgctatgataagtgcaaagtaattcaacaagtctagacaaaggagatagatggcgtggagtggtctttgtgcagaggattctagaaagggagacaagactggagacattttaatccattagacatgaggctcccatggaccaaagagggattttatccaagtggcctgagggataggtatttagagaggaagtattgaaaagaatgtggtcggcttctcactgcagaactggacctggctcacgttctgtgctcccctatgggatcatgtacttcagagaaactttgccctcccaccctcatcatcctcaaagggtgtgtctttttttgtttttaattatttttcttttttgatacagggtctctctctgtcacctaggctggggtgcagtggcgcaatcatggctcactgcaaccttgaactcctgggctcaagggatcctcttgcctcagcctcccgagtaactgggactacaggtgtgtatcgccatgctcggctaatcttttaaaaaatttttgtagatacggcgtctcgctttgccgcccaggctagtctcaaaccctgggctcatgtgatcctcctgcctcggcctcccaaacaacgggtgagtcttgattcattatagcccatcacgctaactgcatcccctgtgccaataactggcttcagacgcggcatgtgatcatgttctggccaatgaactattagggtccgtggggtggtgttggaggtggagcatgtttctagagaagttttatgattctttttttttttttttttttgagaagggtttcactttgtcagccaggctggagtgcagtggcgtgatctcagctcactgcatcctcgacctcctgggctcaagcacaccatgctccgctaatttttttatatttgttgtagagatgaggttttgccatgttacccaggctggtctttaactactgagctcaacgatccacctgcctcagcctcccaaagtgctgggattacaggcgcgagccaccatgcctggcttcatgattcttaaaaacagacacaaggaagtcatgattccttttttgagtctgcattttggtgaggatgtgagggctggagctgttgtagctatcttgagaccatgaggaaagctagctgctgcactgaggatggcagagcaaagtgatggaacgagcttgagttctcgatgatattgttccactgccgaattaagccatatggggtcttctcattgtctcagataacaaaacttttttgtagttaagtctcttgcagctgggttttttgttacgtgttgctaaaagcttcccaactgatacagaagaggaggtagtatttgaagaatgagtcttggagagaaaagagagagctttttaggaaggggatacagtccagacaaagatgttgaggaaacaggaaaagtacatgggagggcagtaggtccgtggcaggtgtagttctaagaagaggccagatagggctcagcccattaggcgcaccccctttccattccctctttgcctctctctatccattcattcctcctttatttggaggagggtctttgttgcccaggctggagtgcaatggcacaatcatggctcactgcagcctcaacctcccgggctcaagtaatccttccacctcagcttcccaagtaggtgggactacagatgaacaccaccagctgagctaattcttaatttttatttttgtagaaacagggtctcactatgttgcccaagccggtctcaaacttctggactcaagcgatcctcccacctaggcctcccaaagtgctaggaatacaggcatgagctatctcacccggccccttcattcctcttgaggggctcctcttcttcaacyggtgtcctctccaatgtacctaagaggaagatgcaggtggcagaagcctgagcttagacataaaatgtttattgagtgctcatacgtgccagtcctgtgctgagctgcagtgaatgagagatggttccttggaacagagctcccagttcagagacagagactaaaacataaacctatgtttctaaacatatggtcaatttcaggcgaaagaatttcagatggcttctggactaacatttgctttttattttaacgttacaagtttattttgatgatcaatttctatatatgatagaaatataaattttctttttaaatacatttaagcaaataaataaagagttaatttaaggaaaactaggtggtaatgttacaggtggtatgtggatatagtaaaacttgtgcaatgagaattaagtaaatatgtgcatgtgtgtgtgtatgtgtgaatgagtgacatgtttgtctgctcagtcttttttccaggcatatgagagcagtcttctgttcttttaggaactggtgctcctgaattttatatagtttcactgggagacaccctgtatatgtgcaagcttccccactcccacygtagttgattggtcccggatttttcaaacatgaaaagcccctctctggtggcagaggctatgaggcacagctgtgggcgacctgttccttgccctactatggacattgagttggagagaaggaagcaggccaagagaaggagaaacaggagatatagttgattctcatttctggtggtagttatgttctgtaaagttgccacaaatgaaactagtgaacaccaacctattgctcccagaggaaccacaggttaggttcctgtgagcttctggtcacagcattttcatccatggatcaacacataccttgttgtatgtgtgtttctgtttaaacactttatttaatatatattgttgattcattgacactcaacgcatggtcagcagcaccgtaactaccggacgaagcttctccagataaaaatgtggcactaaatggaccttgaaaaggatgcttgtttataaaaagagagctgaacaagaagaagggcattgccttgtttgaccttagctggaaacatgtgcatcatgtgactcaaaaaattatcacagccgggtgcattggctcacacctgtaatcccactgttttgaggtcaggrgttcaagaccagcctggccaacatggcgaaccccgtctctattaaaaagacaaaaattagctgggtgtggtggcgggcatctgtagtcccagctacttgggggtctgaggcaggacaatttcttgaacccgggaggcagaggttgcagtgagccaagactgtgccactgtactccagcctgggcaacagagtgagattctgtctcaaaaacaacaacaacaaaaaaattatcaccactccatgcatgcccatgaacaaccatgaaagtaccatgaataggccgggcacggtggctcacgcctggaatcccagcactttgggaggccaaggggggcggatcatgaggtcaggagatcgagaccatcytggctaacacagtgaaaccccgtctctaccaaaaatacaaaaaattagccgggcgtggtgacgggctcctgtaatcccggctactcgggaggctgaggcaggagaatggcatgaacccgggaggtggagcttgcagtgagcccagatagcaccactgcagtctggcctgggtgaaagagcgagactgtctctaaaaaaaaaaaaaaaaaaaaaaaaaaaaaagaaagtaccatgaatatttacttggggattgattgcaaatacattttggcaagtaagtgaattcacaaatagagaatctgtgattagtaagaatcaaatgcagatagatgatagatagatagatagatagatagattagatagagwtagatgatagataaatagatagatagatagatagatagatagatagatagatagatagatagatagatagatgatagatatgttgaggtggagaggccctcagctctggtggggattgagtcactggccctagctatctcccagtccttcttatagtttgactattcaatttttgtttgattatatgaaatatttcagaggccttctcaaatccaccctttttcgttttctcctaagctgattcagatggagttctgttgcttacaaccaaaagagttctgacttagcatacaaagccctggcacatagtaggtccttagtgaatgtgagtcgcttcctttcatcactgaatgcagggttggctaaaggtaaccctagactgtatgtcacagggagaggcagcagtgaggagaagaaaggctttataatttaaaaacacagggagacaacatatttccaactcttcatttaccctgagctgcagcagcagtcatttcttgccacgttccagtacagatggaaaagtcactgaattacaaacctagttgcaagctatttttggtggagttgtatgtggtggtgctggtgggttgtgtgtgtgtgtaatgtacgcattgggattcttggccactgcctctgtttgtatcagctgtcagcaaatcagaggcgccatccacgtttgtcataattcattacattaattaaccacttttgagaactgggcgcgggccagaggggatgcgggggagggaagcctccatattgttgtgtctcaacctcctaggtcagaatttccacggtttgatgggctgccatcgcctgcacatgtgtcccctaacgcgcggaccttgatgaaatcatcatgtttacatctttgaatattctctgcagatgatgcctatggcgggaagccagaggcaaacagcatcccagaacttggctctggaggcccaactctgtacccaaaagagtttggaattaccctgacgtctgataccaaactgggcgtccttctccagcctgtccctccctggccagttccctgggccggctgcctggcctaggccttctgcaggacaaatggcgccagctcaagacccagtgaggtgaagccatcctttttccgtgccccccatttcagtgagtggtgccawtgcccacccagctgccaggcttggaccctgcgggtcattcttgactcttggcccatcccatctccatatcctgttgatctctttttattcacatttctcaagacctctccagctctaggtgaccatgatctgtgcctccatcatcactcacctggaccaccaccgcaaactcatctctagtcttcttttgccctgtcttgccttccatctttccagcaggctgcagccagagagatttttaaaaatttttattttttatttatttttttaattaattattttttttttgagatggagtttcactcttgttgcccagagctggagtgcagtggtgcgatcttggctcacagcaacctctgcctcctgggttcaagagattctcctgcctcagcctcccgagtagctgggattacaggcatgcaccatcacacctggctaattttttatttttagtagagatggggtttcaccatgttggccaggctggtctcgaactcccgacctcaggtgatccgcccgcctcagcctcccaaagtgctgggattacaggcgtgagccactgcacccggccccagggagattttttaaaacacgaatggaagcatgccactgtcctgcttaaatctcgccatgctttttcatcgaccctgggactctacgatgctttacaaggtccttccagacctggctcaccctgccaatcattgattcctgtccatttccaagccttattctccaacctcccagtcacttcttccaatacattttcttatgtttctttctgtttcatgcaaccaaagttcctgattcctgaatcatcaaaagtttttattggttctgcatatcagattaagggcaattttgtttatcttttttgaacaaaaatgtcctaggttctaactstgtgctcagcaactgagccaccaattaatgtttggctactgaatctttggtgcttagaaactaggtctttggtgacatcacttaagctatcagatcaaaccttacctgaagctagtgtcaaaatgttctgtcctgagtcaacagattcttcttgttgactaagctagtttgaattaagtttcaacacagacattgaatcacaaactgtttttggacaaagacaacatctgcttcatcctcactcaattatctgctagggtgggcttgttatttgtattatccaggcctattatcaacctctttcctatcttggtgatgagagtaattgccctctgcacatcacttggacagtccacaaagccctgcacatccattatctcatttaaacctgtcgacaatcctgggaggtgtgtggaatttatccatttcatacatgagagaactgaggctcggagaggtaacaggcttgcccaaggtcacatggctagtgagaagcagagctaatcttttttatttatttatcaggttttttacatatgtatacatgtgccatgttggtgtgctgcacccattaactcatcatttacattaggtatatctcctaatgctatccctcccccatccccccaccccacgacaggccccggtgtgtgatgttccccaccctgtgtccaagtgttctcattgttcagttcccaactatgagtgagaacatgcggtgtttggttttctgtccttgcgatagttgaagcagagctaatcttaaatcctgtcctctgattcagaacttatatgctttcttaatattcattaaatcattcattcatttaagaacagcaaagatcattgaatgcttgccacatgcagacagcttgctaaactttgttgattcatcagtgaacaagacaaggtctcggtccttaaggaacttactatctaacaggagacacagacagtggcgatgttgtgtggaaacacctatgatgagggggtcacctcttcatcctgagcctagacagctgggcaccaagacttgactatttccagtctccttgtgtctctgctttaagactcaacttccaggtttgggtggggtaggggcagattggaacatatgcaataaactgtgtgctatggggaacaggcaactcctcagaaggaaattgggacatttctaggaaggggaagtagcaacaacaaatgtctactttaatttaggatactggagccatttactggagtccagggttatagtgcctgaatgatggttaaggagttatagttgctgtagggtctgcattagagcttttattaagtgatttcacttcattttggacattaggtttttgtcccctaagtccttttgacttattttggaaccatcttctatgaatgttgctaaaccttttaaggagaaagtagaagttggtgaggaggattgatgcattttctcatcatctactgcagcaatgtaaatacgtactgtctactttccccaacccacccatagaagacatgactaatcgattctggtattcttccccactgagcccagatcaagcctcagaaatcttatcagtgtgctccaggcagccacaaccagtggatcagagttggcacatgaggtgaaacatatttgtgagttctgtttttggactgtggggccttggggaaaaattccttcttttctctggacctcagtttttccatctgttaaataatgacccaaatgacctgtaaggtgtcttccagttctgacagtttgggacaggaaagtctttaagtcattgggtggaaagttgtgtcctggggcaggtttttagcctctagatggagttttctgtcccactcccttggagcctttggggctgcaaagtggtaggaatcaaatcatatgctggggaatagactaaatattttcttcacaatatgtctaggtaatactgctagagaacacccaagggctaagtggtgtggattcaggaagcctcagtagacaacatcaagggtagttggcatttatcaagtgctgttcggtgtgcctggctccaaacccaatctccaagttaatcttctaattaccattttacagataaggacactgaattcagatggttgcatgcctgtccacagtcagagcagagccaggattggagctcgggttccgagtccatagctctttccctattccacctgtctccagttagagaggccctaaggggagggtctttgttacacattgtgatttgccaagcccagccccacttcagggtcactcctctctttgatcaaacccagtttgatctttacttcttggaaatttctctgctcaacccaaatagggatgtgttctctttgtctccctcccccagggtggtagacacctcctagatgctcaccaacaccatctccttaatccccagcctcccttgcagttaagtggggcagtgtgactagttccagccaatggaatatggacaagtgaggtacgtgacttctgggccagcccacaaaatgttccacgcagtcctccatgacgtccttctcttgcttgttggccgacctccagtaggggaatctagcagaagactccaaggaggcctggatctcataatgactgcggggagcagaagctcctgcccatgcactgtaccatgtgatgtcttcctaagtcattgagatgctgggattatttgttaaagcagcttgcattaaatagcctgacaaatacccccagcatcttgtaattcatttctactgaaacaacaaccgcactgcattgtaattggttatttatctgtcttacccagtgggttggaagctgcttgagggcagatatgagattcatctatgtcctgtgtccagcacaagaagacattcttcatttattcgatcaatgcacaaaaacaccttgagatgcagcaaaactgtgaagtttgcaggctctggagttggggtgggtgggttggaatctttattttttcccctgttgcttggatcaccttgggcaaggtacttaacctctctgagcttagttttctaatctgtaaagtggtgataacagaagtacctacctcatagaattgtcacgaggcttaaatgaggttgtgtgtttagcccatatctagcaagcagtaagcactcaataaataggactcctattgttataataggacaatagctattattgtccacatttacactgagatccagagaggccgcttgactgattcaagatccctcaataaaggagagagatagtgtttggattcagctctycttctttctgctgtgcttgagggagcttgtcagccatcttggtcttttttcctggagctctgggtggcagccagcaaccccagtgggagtggtgacctgggagtttttaacaccttcaggtgctaagtggccttcaggtgctaagctgaggcaaagggcagtgatttgcttccctggggatcatcatacacttgcttgaaagacctttcagggtggaaatgtcacctgggaaccagtgtccctaccctggaggagccaggctgtaccctggggacactcctggaactcccagggaccccgcctgagagcccttgttgccagggcagccgttgggcttgaagagccccaggagctccaatgtggggccagcttcactcttttccaggctgtctgtttttctccccttctacctctcctcctcctccttcttctgaaaaatactcagcagtttttgagctgctttggcaatctctgggcttgaatttcaagacctgcagcctttgaggacaggagcccagaggaaggttttcagatctgtgacccagacggcaggaagtgctggggtttcctgcagggtgggagaggtagggccatgctggggtttccccaggcaggatgggaggggtcccagcagtagtctgacttcagtcccctgggaaatttagggaaaaggcccacagggagtgctggggaattttagggcatcctggcctggtgcagtgatgacagcccacagcagtcctggggtcccctgccacgtgcccagggctggccttctgtgggtgctgagctccacctcttccctggccttcttgcccccttctaaaacacactgcacacttgcccacctctgtgccattctcctgtactgcctcccctctccctttaccacctagtgccccacactcatgttacctgaactcaccccttcctggggagggtcccctggcctcttacagcctcaggcatgctcctcctcagggactgtcctgtactaaccaaagaatgccttgaaggcagggcccttgactgttcacctttgagccagtgcctcagtgagtgaatgaatgaaccagagggggaatgaatgaaagagggaaagaatgagcaggaacagtgactgcctgtgtgaatgagtgaatgagtcaatgagtgcatgaaggaatgaatgaacgcgcccaagtgggagtgatgggggagctggggcttctgggtggtccctggktcagcagcggcagcagaaaaggaggcactagctggcgggggaaggaccagcctgaggggtctcttccccatctgcagtgctccgcccctcttctggctcctgtatcccctcakgctcccatccctggccacgctcagagaaccccccaggccccccggttagggttttcttggctggatcctcctaggaggctgtttctcttggatgaagccttcccctgacccctcctcccctccccaagtcctcataaaatgttcaaagtattttcttttactcaataaagtaaacaaaggcaagggcagcctcgaggctgaatttgcatccccttggctctgctcagcctaggctaacaacctccttcagcagcagaagtctttgccgctctactccacagatgggaaaacagggcttgtaggggtcaaggccattctgttaaggagcgtgagacacaaacttgacctgggccttcagacgtggatctggggagaaccatccccttctcagtggctcctcttgacctcactttgattccagtaggtgacagtgcaggggtgccctggggtgggtcccttggagccttggtggtgagagtccgcaggtttttctgcaagaggctacaatatggctgtgtgcatcttctgctgaacagctacggtacataggcaggaggatggcagagccaaggggagggcmttccccactgctgaggaaggttggacgccccacctggggctccactgggaccgaagagactcgggtcggggtgcagggtgggcagaaccatagaaaggagcatgcactccctgagcattcattgcaacagcccccctaggtgggaactattatcaccatctttttttttttttgagacagagttttcctcttgttgcccaggctggagtgcagtggcgccatctcggctcaccacaacctccacctcccaggttcaagtgattctcctgcctcagcctcccgagtagctgggattacaggcatgtgccactacgcctggctaattttttattttttttgtatttttagtagagatggtgtttcacaatgttggccaggctggtctcgcactcctgacctcaggtgatcacctgccttggcctcccaaagtgctgggattacaggtgtkagccaccgcgtccagcctatcaccatcttacagatgatgaaattaaggcccagagaggtgacatgacttgtccaaggtcacacaggtggtgaatagtggggccaggattcaatcgaagcatccttcaagtctcccaagcctgggttcttactcattctgctagttgggtgaggacctgagtgggaaggctgcaagtccaggtgtgagctggcatcagacctgtgaggtgcttagcagggtgcaggtgcagagtgggtgcttttctggatgtatggttgtgtgccttcctccgactgaagaccaagactcccaggaagatggggactttccgttcttgcaggagtctggattctccttggttaatcagttctcccagaagcctaaccactttcttcagtcttctgtgcagatagatgctctccagcactcactttgggccggtccccctttctgactgctctcatcccacatccctgtggtgggtggagctggctccttggaaaagggggttccttttagacagccctgccctccacctccctttccactcgctggcctcggccagccccctgggcccagctcgagaacagacactcacccctctgccaagcacggagtgggaagggaagggctgtgcagccccagccaggagtcccagccagggaacagatcaagagcggatgggatgatgggggccactgaggttctgggaccaaggcatgaaggcatgggaactttgggctgcggtgggtcaaggggtggccaggaggtcaagggaggagcagggggctccctatccccagctcagcctgggtgtgaaagccaggagtcttctagttgcagctggagggggcacacagtgggaaatagcctcactccattgctccttaaaggggccagccaggcttcttaaagtggcagctcctgggcagggaggggccccgggagagcttggcctctcagccctgggagcagagcttctttccatcaggcagtgagtccacctaccatagagatgccctggtttcctgcctcctcaccatcatggcatctagaaaggcctcctcccacatgagggggctgtggggttgggcccctcatctgccttggcctgcgtgtccagtcctgggcctggcccaaaagagagcctcagtgactactgagaagtagatgatttgatgaagggaccgggctggagctgtgagctgagaccccagagtacaaccggagctcttcccaacccagggtatgagcttggtccaaatggatcctggcagagacgggcactccttggtcaatctgtttctgaaccttgccatctccactcatcccaaactttccagccccatagcacatctgacatctgtgatgtgcttttcctatgtgataaatggacaccgtaacttagtatttagggaccagacaggctgagttcaaatcctcgctctgcctattcctagatatttctgtttcctctctgcaaatggagctatgagtaataatatattggggcattgttgaaaggcttagatcatctaaagcagcgacagtgatgagaacaggacctgatcttaaagggtgcaataaacggtagctcttacttttactacgaacggcatgtgcagaggatactatgcttttctgtcagctcagaaaactgggtagctgagaggcaaatgacatgtccaaggtcacccagaaaatatacagcagagccaggatttgaactcaggtccagctgagccaaagcctgctttctttgtgtcatcatgcaccacctccttccacatcttgccctgggagtgcgtgatcactggggctcgggagctgctaagtgctggggtaggggatagcattttactagggtcctgggggccagtggctgaccagatccatgccctccttcccctggcctaatgctgcagatctcaggatgtcaaagggggtgatgtcagacagtcatgctgggtgggaatggctctgaaagcctgcagccccttcctcgcatggagcctcagcttcctcgcctgtaggttgggatgatccgacagaggcattgtgagtctcagctgagctataactcgtgagaaagcttttcggacacatagcaggcaaggcctcccaggttggaggacaggaagggagcctgtctgagtagggaagggagctggccgtgtccacagcctccaaccctcggcctcagccccggcccacagctgggcctggactcctgctcgtggccgcccctctcatgggtctgcggggatttctctgctccaggctgaccccttccttgcagaggaggcttctgttgcccgtccgctctgctgggcctgggctattctctgtgtttgtgtgtgtgggggttggggataggtgggggtcctcttggattctgtgatggagggaatcctggcgtccctgtggagtcagcctgggccgccgccggctcagccgtccttcccagagcctctgcagcccttctggctgccgttgcctgcagattcccggcgaatggtgctcctgagaccgctatgggcccaggctgcgtcattcccaccctccctgagctctgggactagctgggcagggctccagccctgggaactccgcctgctgcttttttccccttcttcgaaatttcactgtatgattcaatgaaatgtcctctgcttcccgtcacctggcttggctaagctgaccttgtagtgtggagcagagagcactggacctggagctcaggtgctggcmtgcgttctgccttggatgtcctgtgtgaccgcaggagagcgcctttacctctgtgggcctcggtttttccatccgtaaaatggactgggaggatggtagtgagggtgtgtctagcaatagaagaggggagaatgagaactgcctctgcaccctctcatgcctgtcttctctctctatggtggccactgtctcttccttctttgcagagatgtttacccaggggtctaagccagagcttccttctctgccctccctgccaagccagcgtacagatcactggtcccagggtcggctgtggtagccctaggttggaacacacccctggttccaagaaggtccccgtctaatatgtgagtccacaggtccttccttcactatcctccccacccaggctaaaggctgaggcacccccmaccaggtggggcttcaccactagagggcgcccacccccccacaacwtgattaaaaaaataaaacccaaacggcctaccccaactaaacgtaatcgttacagcaattattgagcatttattatgtgtcaggtgctgtactaatccctacaacacccctagaaggtatacagtgacatcattcccacttaacagatgacaagaccgaggtctggagaagtaaaatgactcacccaagaccacccagctggtcagtgacagagctgggaccagcaaccaggtctaagcagtggagtcccaggcccaatgcagaggcctcatggcacccagagtcagccactgcagtggggaggatggctgggatgggagctgaaggtggaggctaggattgatgagatcagagaccaccaaaggaaacgtttgtaaaccttcacaaaattcggcagcttttcaaaataatgataatggtaggttacatccatagagcactcaccatgtggcaaacacaataccaagagttctatatacacaatctcccctaatactaggaacaacccaaacgggggtatgttccagtattatttctgttacagatggggagactgaggatcaatgaggtgaagtgtcttgcccaaccttgctcatttgaacccaggtctstttgcctctggagcttgtgacttaacttctgcattctgctgcttttctcctttagaagaatcttatccagaatcccaacatttaagagataaaagtgggtggaagcagaggaggtgggggtacaggagcctgaagctttccaggccagtttgaaaagccctgatcgaatgcccccctctccaagccccagacaggagcagggacttgcccacgggcccagagctggttaggggtagagcccccagaccactacttgctccctctgtgggtgctaccttgactttgagataaggtccaggcctcaggtgacaggggtagatgctttaatctttggcctcagcaactgggcagagaaccttatatccctgatgaagagacttccaccctgactagagactctgggacatgtsggctgtcataggcagtggcagccgaggggtggcttgggggatggacatgtgggtcccctaaatctccatcagtctttcccccaagccatagtaaacaagaggcccttttctcacctctgagtagtgtgcagtcccaaaccccctcctgggtaggatcctgggtcctggagcagactgtggtcatgtgagttgaatcaatgaccccctggctgtgtgtctagcttgggagcactagggggggatatggtctccgtaccatgcgaagtcctgtttctgtgtaatgcagtgaattcctacccaggtcccacctgggattcaccttgttcttttgtaggagtcgaatctctgcaattgtctgacttctgcagtgatgctgggggaattaaatgtagctgcagtaygtacaagacatatcctgcagtgggggaacactgtcaggtgggtcccgctggggctggggacatgggaaccaataatgtgtgtgaagcacttagtggggaccaggcccagggctcagcatgatcactctgaatccatacagcagccctgcaaggtaggcactctggagcttgtgacttaacttccgcattctgctgcttctctttctttagaagaatcgtttctagaatcccaatatttaagggataaaagtgggtggaagctgaggaggtggggggtacaggagcccaagagtccccaaggccacagtgctttcacccctctatgaggatgcataaaacagagcctcagagaggctaagtggcatgttcagggtcgtccagctgcgaagtgtcgcagctgggatttgaaccctggttggctggactcaaaggtcccacattgttctactctgccctgctggagcacctgtgtagactgttagattggttcagtgaagcatgcctgctattgacacccttgcgtagtcccttttgaggtgacttgttacgtagcagcgatagatcgttaaaacagttcctgggaggagtcactgaacaaggctgggagtgagattaggaaactttcttttttagtttcttgctcttgaaagatcaagtccctgtgagtttggagcacctctgcaggattcctcctgagcagaaatgaaggacaaggagggcttggcagcgagagctcaatattcatgcatckctgtgttctctgctcctcctggccacgtggctccactgctcttccctttcttctttccaattaggtgtggccatgtacatgatttctaggttgtggagtgtggtggaagtgattcatgccactttgggcctggcccaaaaaactctcctatgagcccccttctcttttcttgccccttggctgagaggagaggactctgagggcctcgaagaggatggaagcacaggatggaagaggcttgggccctgaatgactgcatggaggctgcctggccaggagcacctgcatcggactgtgatgtgaaggagaaacgagatttcattgtgtaaaagccactcgctgaggagccgggactacctggtcaggacctagttttccctaactaatccagagggtaaggagaggtcttgctgagaacatgggatgtgggccttccagtgtccaaggggaagttggatcaagagggagagaaatgtaccccactgtccctgggtgctgtagatactgggtcttggcctcctgggggaagaagggctttgaggtgttttcttgacaaatcatttgttgagcacccgctctgagccagtgtctgtctcagcctggagaggcagagatggcgaagctttgctctcaaagtgctcacagtgtgttagggagacaaaggcaggtcagggtcaggtgatgccaacctctcaggagccataagctcccctgatacagggcaggtggggagggtaaataaattagtgaggaggccaagtgtgaggcaatagggaatggtggggattgtggtgaacttcagagacacacctggcggtggtggcagcttccatcagctgcagtctcttgttgccacatgggtccatattctcacactgggttcatgggaaaatggaccctgtgtggacagagcctccagttttttaagtcaaatcagaaattttgatacttatgtgaattc

SEQ ID NO: 15 - DNA, 169047 bp, Homo sapiens
aagctttctgtcttgagggatcagacgtataaatgtcaggcagaccttctgatgatcatgatgcaaccagagttaccacagtgagtccatatcacagacaaaggcgaagacacttgatcccttcttaacctggtctcccacccatgaatgatttttgttaggatttcagcatgttgaaactaacccacagaccctagttacaactttctcagggcctgagagctggggaatcccagtttgggaaccaaaaaactagaaaatcttgagggcaactctggctgtcatgaactaaaacagagcaaagatggaagcctgtggtatgtgcgtgcaggtagaatctcgatttgagaaatggcgttacaaggaattaacacttcagaaatgccagctctgtgccaggatttttttattttattatgtatatttgtcatggacaacatgttttggaatatgtatacattgtggaatggttaaataaagctaattacatatgcatgtgctcacaaagttatcattttaggggtgacttaaaatctctcagtgattttcaaaaatatatgttattaatcatagttgcaatgttgtacaatagatctcttgaacatatattcctcttgtctaactgaaattttatgttctttgaccatctccccaactgccccccaacaagcctgaaagccctggtaacccctattctactctctacttctttgagttcaactttttaagagtccacatatgagatcatgcagtatttgtctttctgtgcctgacttatttcacttagcacaatgtcctttgggttcatctatgtcacaagcaacaggatgtcctcctttttaaaagactgaatagtattccatggtgtgttttctttatccaaccccattttctttatccatccatccgttgatgaacacttaaacacttagttggtttcaaatcttggctattgtgaatagtgctgcaatgaacatggcagtacagatacctcttcaacataccaattttatttcctttggatatatatacccaggagtgggattgctagatcatatggtagtactatttttaattttttaaggaacctccatactgttttctgcaatggctgtgttaatttacattcccaccagcagtgcacaaggcttccctgctctccacaacctcgctagcatttgttatctttcatctttttgataacagcattccaacaggtatgaggtgatatctcattgtggttttaacatgtatttctctgataattagtgcagaagttttagatacagaatcacagttagtcctgacaataatctctaaaatacccatgcagatggggaaagagctgcagagaagttaaagaaattgtctgcaccttacagctgagaccagaaccaggtctgtataatttcagagcacataatctttcaaagtaacctaacaaaatcacagcaacttttaggttcacagagaacaggccaaaaaaacaaacaaacaaaaagaaagaaattatagtaatttccaggtatgaaccagtaatccaaactaaacatattttgttgaatgaatatcctggattctactatgtttctccaagtccccactgtcttaaaacatagcatttggggttcagtagttactgataaaccttttgcatatctatgcactgttagttctttaccctacacattattttattgtagtaaagccaattttctgacatttatctgaaagcaaactgtgaagtacttccattctacttcctggtgatttttagtgacctggtgccatttgaacgtatgtgtcctccaaaattcgtatgttgaaacttaaaccccaaagcaatggtattagaaggtggggcatttggaaggtgattaggtcatgaggccgccaccctcatgtgaatgggtttagtgcctttataaaagggctggaaggaactagctaggcccattgcccttccatctcttctgccacatgagggcgcagtatttatcccttctgctcttccaccttttccaccatgtgagaacaccagagaaaataccaatctgtggccaggcgtggtggctcacgcctgtaatcccagcactttgggaggctgaggtgggcggatcactaggtcaggagatcgagaccatcctggtcaacatggtgaaaccccatctctactaaaaatgcaaaaattagctgggcatgctagtgcgctcctgtagtcccagctactcaggaggctgaggcaggagaatcgcttgaacccgggaggcggaggttgcagtgagccaagattgcaccactgcactccactctggcaacagagcgagactctatctcaaaaaaaaagcaagcaagaaaataccatctgtgggacaggccttcactagacaccaaatctgctgacactgtgatctgggacttcccagcctccagaactgtgagaaataaatctcaactgcttatgaattacccagtctgtggtgttttgctatagcagcaggaacagactaagacattcagggtaatgtgtcatttcaagacatgaaagctcagttctgtaatattttcttctcttattcctttgataattttcttctacccatcatctgttttctctttctgaaacttctactagttaaatattaaacaactctggtttcttaacctttcttgtgtatattatgattcaactaggatcaaaaaaatatctaattaaacagtagcttaaacaaattaggggttttttttgtttttgtttttgttttcacacaagaagtcaagaagtcattggaccagtgttatttcagaggctcaggaatgtcagggcaaaaatatctggaactctcttggtctcttacccatggctacaagatagctgctgcagctccatccatcccatccacattcaaggcagaactaaatgagcagcagaaggaagcagaaaggtttgtatttgtatcagaagaataaagcctttccagaaattttctacagacttaaacttatgactccttgaccagaaatgtatcaaaaggcaaatttaattacaggaaagtctaagaaaggaagttttagtatcccaccatgaaagtgcaggaagacaagagaaaggagggttgtaatgaaggaatgagacaatccagtgccctattttcttttttcttttttttcttctctgagacagagtcttgctctgtccctcaggctggagtgcaatggtgccatctcagcttactttaaccttcgcctcccaggttcaagcgattctcctgcctcagcttcccgagtagctgggattacaggtgcccaccaccacgccaaactaatttttttgtatttttagtagagacagggtttcgccatgttggtcaggctggtctttaactcctgacctcatgtgatccacctgcctcggcctcccaaagtgctgggattacaggtgtaagccaccgcactgggccagtgtcctatttttgtcctttttttttttttttttttttttttacttcatgcaagaattcctcaattttatcttctaaactttctgttgatttttttttgtttctgccctaattattttaatttctaagagtgttttcttctgatattttttgttgtgttgttttaatagcttcctatcttgtttcatagctgtaataccttctcatctctctaaagatatttataacttctctttaagtccattttgttttttgccttttcctcataatattttctttttcttcaaaattgatagctctccccacacatagacattttagcctctgtcttctatttgggtagcgtccctcaaaagtctgatgatctgggctgttgattcatacataaatatgagacaccaagaagttgtttggaggagctgtgtgattaaattagaattgtcccctggcagcgtgcagagtgatcaggtgttgagccagctctttcatggggcagacccccacaaccagtgtcattatgtgtgagtattttctctggatttactgagtttttccattgattttccactctggtcttcaatataatggagttggagaccagggtccaagcagtaattccactgccatagtgggagcagggaggatggtgggagtactctgagccgaagactctggtcaatttctccagagaaggaacttcgtgttctacagaggttagagaaaggtcatactctgatggtgtggattagaggtctaaaagatcctttgagaaaccatcaaataatctctctgtcttcatctccatgatcttgtcctcctttgccccttccactgtactggtgtccccaatttcaaaaggtttcaggtgttctgttgaacaaatcttttgtttctcattactcttcccttcctgagatacgtgggtttcagcctccgctgctaagtgagttaccattcctcaaaccacttttcagcttctctactcttctctccctccaattctctctgtccttatgagtttatgcctttttagtccttcattgtaattttggacagggaggagagggtggaaatgaagctcagatatatgtaagtattgaatctgccatgctaaacgggaagtctacacatatttttttaatatttccaatttcacaacacaattcctccaaaaaaaacttatggagctttttattatgaatgtgtcactgacattcagtcataatctatcttagcaacgatataggcacataccagactgaaaagatttgacaaacggtattctgagaaacccacatttggtcaataatcaaggaaataatttgttaaaaaggaataagatgaaacaaatccacattgcgtttgagctctataagtcaaagatacagttttaaaaagtaaactcaagtaatccaatattacaagatctagagggtcaggacaaagtgagttaggcttgcacatcaaagaaatagctaggcaactaccaaaaatgtttccaggtgaaatcaagttgcaaaattgtataaacaatcttgagataattaaacaaaagaaaatatattttcagatgttaagggctgcagagggaaaaagagcgactctatatagagaaaattaatatactggagcttatctcctaagaatggcttctgaagcataaggtgtttttttttggttttttttttttttgagagtctcactctttcacccaggctggagtgcagtggcatgatcttggctaactgcaacctctgcctcttaggttcaagtgattctcgtgccttagcctcctgagtagctggaattacaggcacgtgccaccccacccagctaatttttgtatttttagtggagatgggatttcaccatgttggccaggctggtctcaaactcctcacctcaagtgatccacccacctcagcctcccaaagtgctgggattacaggcatgagtcaccatgcccagcctgaagcatacattcaatctaacaagtcttctaggtatttgttctacagacacagttacccaagtgctgaattgcatacattcaaggatatttattttggagtattttaaatcataacacaaaatgggaatattctataaatatttcaataaggtctgccagacccatatatccagtagccatgggaatgatatctaagctgtgagtgaaaaccaaaggattaaaaacatgggcatccaagagaaggtcagggttcaacgccagcacggtctttgacacagcggctagcaaagattcattggtctgtgcaccatttccagcagctatactccagagttgctggtgctcaccatctcttcacttctctgcctggtatttagaaataaggctgatctccttacagtgaataattctctggtgcaggccacgagaggagcctggacttcgtcctccttgtggcagtaaagaggagcctctcccctctcttctggaatggtatcagaggagcttagtagagactcgagattttcattattatccaaaggtcacaaggccacccccaccatgatgtcattggagactacctggagaggctcaaggacccgtgaatctataacaaaagatctaacatttatgtcctcagacttccaaaaggagagaagcaaaaagacataaccgaaaaagtattctcacagaaatatagttgaaaacttcccaaatttgccaagagatgtaaatgtacagtttcaacaggctgagcaaacctccaaacataataaacccaaagaaatccacaccaagagacatcataatcaaatttctgaaaactaaatacaaagaaaaaaatcttgaaatcagccagaggaaaacatggcagaaacaattaaaatcgaaatagatttctcatcataaaccatgtattccaaaagaaaagtgacacaaatatttttcaaatgctgaaagaaaagaactgtcaatccagagtcctatacccagtaaaaatatcctgtgagaattaaggggaaatcacaatattctcagatgaagaaaaactaagataatttgtcatcaggagaaccgccctagaagaatagctaaaggaagttgtctaaacagaaaagaaatgatacaaggaggatggaacaccatgaagcaaggaagagagtacatggtaagcaaaaatattggcaaacacaataggctttatttctcctcaagagttttccaaattgtatttgatggttgaagcaaaacttataacactatctgatgtggttctcaatgtatgtagaagaaatatttaagacaattatactataaacaggggaagataaaagggtgttatggggggaaagagttctatacttcactcaaaggataaaaaagaacatcagttgactgaaataggttatggatacacaatggaatacttagagcaatcactaaaagtgctatacaaagaaatacaaatgctaaaaaagaaatacattcaaaacactatagataggctgggtgatgtctcacacttataatcccagcactttgggaggctgaggtatgcggatcttttgaggtcaggagtttgagaccagcctggccaacactgtgaaaccctgtctctactaaaaatacaaaaattagccaggcatggtggcagacacctgtaatcccagctactcgggaggctgaggcacgagaatcatttgaacccaggaggcagaggttgcgatgagcagagatggcaccactgcactccagcctgagtgacagagcaagactccatctcaaaataaaacaaaacaccacagataaatcaaaatggaaaaatgttcaattaacccagaagacagagaaagtgaacagagaaacagaaagcagaacaaacaaaacaagaaataaaatgtcaggcttaagttatagcatatcaataagtacattaaatgcaagtagccaaaataatcaattaaaagacagattgacagattggatttacaaatatgacccacctgagtgaggcctggtggcttgcacctgtaataccagctacttggtaggctgaggtgggaggattgctcgaggctaggagctcaagaccagcctaggcaacatagcaagaccctcatctctaaagaaaaaaaaaaaatagctggaaatggcagcttgcacctgtagtcctagctactcgagagtctgaggtgggaggatcacttgagcccaggagttcgaggctgaggccacagtaagccatgatcacaccactacactccagcctgagtgatagagcaagacccttctctaaaatatatatattcagattgaaaaaaaaaggatagaaaaagacatagcatgcaagcattcataaaaggaaagcagagatcgagcactatggctcacacgtgtaatcccagcactttgggaggctgaggagggtggatcacttgaggtcaggagttcgataccagcctggccaacacggtgaaacccccgtctctactaaaaatacaaaaatcagctgggcttggttgtgggcacctgtaatcccagctactcaggagactgaggcaagacaattgcttgaatcctggaggcagaggttgcagtgagcagagatcgcaccattgtactccagcctggacaacagagtgagactctgtctcaaaaaaatggaaaacagaaatggttatattagtatcaagctaaagtagacttcagagcaaagaaaattgctagagacagggagggagactacataatgatcaaagggtcaatccaccaggaagtattaacaatactaactgtctgtatgccaaacaacagatctgcaaactatatgatgcaaaaactgatagaactgatagtagaaatagacaaatccacaattatagttggagactccaacactcctctctaaacaattgatagaacgagtagaccaaaaatcagcaaggctgtagaaaaactcaacaacaccatcaaccaacaggacctaattgacatttgtagaacagctgacacaatagcagaatatacattctaatacacatcagaatacacactaaacatacaccaagatagaccatatacattctaatatacatcagaatgcacactcaacacacaccaagatagaccatgtacgttctaatacacatcagaatgcacacgtggcctcccaaagtgctgggattacaagcatgagccaaagtgcccagcccaatatgaaatagataatttgaatagccctataactattaagaaaatttaattcataattttgaaattccctcccagaaaaatatccagacctaaatgctttcactagataactctaccaaatgtttaaagaattaacaccaattctacgtaatctcttccagaatataggtaaggagggaattcttagttcatttatgctgctataacaaaatacctgagactgcatcatttataagcaatataaattttttctcacagttctggaagctgggaagtccaagaccagagcaccagcagttctggagtctggtgagggctgctatctctgcttcaacatggcaccttgttgcatcctcctgggagaataaatgctgtatccttacatggcagaaggatagaaggacaaaaagggcctagctagtttcctccagacctttcatatggcactaatccattcatgagggctctccctcatgacttaataacttcttaaaaggcctcatctgttaacactaccataatggggattaagtttcaacatgaactttagaaagaacacaaacactcaacccatggtatcttcataattggttttatttctaccaagaccagatgaaggcagaaaactaccaaaaaaaaaaaaaaaaacaaaacaaaaaagtcagaaaaccacagatcaatactatcttgaaaacagacatgaaaatcctgaaaaaaaaaattagtaaataaaattcagcagtatgtaaaaagaattatacatctcgaccaagtggggcttattatagggaggcagagctagtccaatattggaaaatcaataaatgtaatcaaccatattaacaagctacagaagaaaaatcacatgatcatatcaattgatgtggaaaaagtatttgacaaaattcaacactcattcatgatttaaaaaaaactctcagaaaattatcaatagaaaagaaatgcatccacttagtaaaaagcacctataaaaaacctacagcaacattatacctgatggtgaaagtctgaatatttttcccttaaaatcaagaataagacaagcgtattcacacttacattcttattcaacatagtactgaaagttttagccagtgcagtaagacaaaaggatggggtgagggagaataaaaaggaagacattattatctatatatagaaaattccaaggagtatacaagaaaaacaaactcttagtactgagttcagtaaacttgcaggatataagataaacatacaaaaatcaattgtatttctatatactagcaatggacatgcagacatcaaaatttaaaatataatatcatttgcaatcactcaaaaagaatggaatacttaggtgtcagtctaataaaacatatccagggattttatgctgaagactatgctatgccgatgaaagaaataaaaatatctaaataaagggagagacatactgtgtttatgactagaagattcaacataataaaggtgtaaattctcccaaattgatatgaagtcttaatataattcctatcaaaatcccagaaagttttaaaaatagatataaacaagcttatcctaaaatttaaatgaaaaggcaaaggaactggacttcaaaacaattttgaaaaagaagaaaaaaagtgggaggtgactcagtctatctgatttcaagacatattatataggtcagtaatcgagactatgtgatattggtggagagatagacacataggtcaatggaacagaataaagaatccagaagcagatccacataaatatgcccaactgatttttgacaaggtgcaaaagcaactcaacaaaggagaaacaggctttcaacataagatgctggagtgattgcacatctattaccagaaataatgaacctcaacctaagcctcacacctcaagcaaaaattaactcaaaatggatcatgaacttaaatgtaaagccataaaacacttaggaaaaaaacataggataaaatagtcaagatctagaatgacgtaaagtgttgtgtttttttcacatatggagaatgccctgtgatagggttcttagacttgacaccaaaagcacagttcataaaaggaaagatgtataaactggacttcatcaagattttaaatttttgttctgtaaaaaatcttgttaagagaatgaaaagacaagctacagagtgggaagaaaatatttgcaaaccatatatctgacataggactagtatctggaatatataaagaactctcaaaaattaaacaataagaaagcaaacaatccaattaggaaatggacaaaacatgtgaagagacattttaacacagaaaatatacagacgacaaataagcacgtgaaaatatgttcaacagcataagccattcgtgaaattcaagttgaaaccactatgcagtattactacatatctatcaggatggctaagatgaaaaatagtgacaccaccaaattctgacaaggatgcagagaaactagatcactcatatgatgctggtgagaatgtgaaatggtggtgtttggaagtttcttagaaaagtaaacatgcaactgccatatgacccagcaattgagctcctgggtatttatctcagagaaatgaagacttgtagtcacacaaaagtttgtgcacaaatgtttatagcagctatattcataagagctcaaaactagaagcaatctagatgtccttcaataggtgactgcttagacaaaatatggtacattctatgcgatgttattcaacagtaaaaaggaacaaacttttgataaacacaacaacctagatgaatctccagaggattaggctgagtggggaaaaaagccaatcttggccgggcgcggtggctcacacctgtaatcccagcactttgggaggccgaggcaggcagatcacgaggtcaggagatcgagaccatcctggctaacacagtgaaaccccgtctctactaaaaatacaaaaaaattagctgggcgtggtggcgggtgcctgtagtcccagctactcgggtggctgaggcaggagaatggcgtgaacccgggaggcggagcttgcagtgagccgagatcgcgccactgcactccagcctgggcaacagagcgagactccgtctcaaaaaaaaacaaaaaacaaaaaacaaaaaaaaaagccaatctcaaaaggttgcctatgtatgatttcatttccataacgtttttgaaatgacaaaattctagaaatgaagagttgattagtggttgtcaggagttatggagggggtgggagcaggaagtcacgggttgtggctataaaatggcaagatgagggaactttatggtaacgaaaatgttctgtatcttgacagtatcaatgtctatatcctgattataacattgtgctattatatgctgttaccattggaaaaaaaatgggtaaacggtacacaggatcttgattatttcttacaactacatatgaatctacaattatctcaaaattaaaagttaatttttaaaaacaaattcagggcatacacatacaaaactaaatttatcttttataagttggcagggttctgctgatatagaccaggtggctctgctgaacttagctggcctcactcgtgtgtgctgctgatctaggctgggttcctccaggtcaactggagaatttgattctgtttcatgtatctgtcatcctcagcaggctggcctgggcatgttcttatggccatagctgaggtgcatgagaaaacaagctctagcttgggcgcagtggctcacgcctgtaatctcaacactttgggaggccaaagcaggtggatcacttgacgtcaggagttcgagaccagtctggtcaacttggtgaaaacccatctttactaaaaatacaaaaacttagccaggcgtggtggtgcacggctgtaatcccagctattcgtgaggctgaggcacgagaatcgcttgagcccaggaggcaaatgttgcagtgagccaagatggcaccactggctgggtgcagtggctcacgcctgtgatcccagcactttgggagactgaggctggtggatcacctgaagtcaggagtttgagaccagcctgaccaatatggtgaaaccctatctctactaaaaatacaaaaattagccagacatggtgacgtgcgcctgtagtcccagctacttagaaggctgagacaggagaattgcttgaacccgggaggcagaggttgcagtgagccaagatcgtgccactgcactctagcctgggcaacaaagcaaaactccatctcaaaaaacaaacaaacaaaaaaaaatcacaccactgcactcctgcactccactctgggtaacagagtgagacaagacgagacaagacaggacaggacaggacaggacacgacaggacaggacaggacaggacagggaaaggaaaggaaagaaaaggggaaagggaagaagaaaacaagttctcgtggacaaacctctctacagcccaaatttgagtcacggcttttacacactaatgacaaaagcaagtcacatgattgagcccagaaccaggggacagggcaggtcattcatgcatggtgggagggcactgtgaagttacgtggcaacaggcatgaatatggggcagaggaggtgaaaagctggggtcaaggactctaccaccatccttgaacacctccaggactaaaaatacctattgcggctttctcttcttactgcagtaactcttacccactcccccactctacctgcctcatccaagtgagggggaaatgaaaggaagaagaggaaacagagcattgaaaatgtgtgcctctgtgtgtgtctgtgtgtctgtgtgtgtctgcgtttgtgtctatctgtgtctctctgtgtgtctgtgtctgtgtatgtgtgtctgtgtgtatgtctgtgtatctctgtgtgtctatgtgtgtgcctgtgtgtgcctgcgtgtccgtatatgtatgtgtttgtctctgtgtctgtgtatctgtgtgtctgtgtatcagtgtgtgtgtgtctatcagtgtgtgtgtctgtgtatcagtgtctgtgtgtctgtttgtgtatctgtgtgtctgtgtatctgtgtgtgtctgtgtgtgtgcctgtgtgtgtctgtgtatctgtgtgtctgtgtgtctctgtgtgtggctgtgtgtgtctctgtgtgtgtgtgtacctgtatctgtgtatctgtgtgtgtgtctctgtgtgtgtctgtgtgtgtgcctgtgtgtgtctgtgtatctgtgtgtctgtctctgtgtgtggctgtgtgtgtctctgtgtgtgtgtctgtgtttctgtgtgtgtctgtgtatctgtgtgtatgtctgtgtatgtgtgtgtgtgtctgtgtgtgtctgcatgtgtgcctctgtgtgtgtatctgtatgtctgtgtatgtgtccctgtgtatgtgtctctgtgtatctgtgtgtctctttgtgtgtgtctgtgggtatgttgtggaaatccttggaaatctcctatttgtgggaactgaatccccagcactgccatgtaaatatttttccctctcatgggccactgtggccattgtccattgtttcaaagaccctacaacaggatctgagtttccctttgccaaaagacaggtcacagggaagggaacacagctgacccttgaacaatgtggggttagggatgctgacccccacgtcgtcaaaaatccgcgtataacttttgattcccaaaaaaggagtcaggctgatgtctgcccaatattctactgaacttaactaccaagagcctacagttgactgggaaaccttgctgataacatagtcagttaactcatatttcgtgtatgaattatataatgtattcttacaataaagtaagccaaagaaaagaaaatactattaagaaaatcatgaggaagaaaaatatttcctcttcgttaagtgcaagtggagtttcatgaaggttttcatccttattgtcttcacactgagtagggtgcggaggaggaagcggaggggttattcttgctgtctctgggtggcagaggcagaagaggcggaggaagtaaaagggaaggcaggagaggcagacacactcagtgtagcttgtactggaaaaaacctgtgtataagtgaacctgtgcagttcaaatccgtcttgttcaagggtcaactctctataacgtctacaaatgtcctaccctgcgccaggctgcctctgccccaatctttattccatcttctgccccatctctgactctcttctcacctttacagttttctagagtccttgttcctttcctagcacgcacccagactttatgttatgagaatccctgtccaaagccactgagagcagtctctttgcctccgtatcttcattagtaaaacatgggtatcagcagtgcccacctcacagcgttgatgtgaggatgaagcgacatgactgataatgagtttacactgcccggtatgcggtgattcctcaataaattgcaggatgtgttttttcttttcttttaatatgggggtaggggctgcccagtctcactgcagacagctaaaggaatcgcagcaccaggcgcgatggctcacgcctgtaatcccaacactttgggaggccgaggcgggtgcatcacgaggtcaggagttttgagaccaacctggcaacatggtgaaaacccatctctactaaaaatacaaaaattagccggacctggtggcgagcgcctgtagccccagctactcaggaggctgaagcaagagaatcgcttgaacccgggaggcagaggttgtagtgagccgagaccgcgccaatgcactccagcctgggcgacagagcgagactccatctaaaaaaaaaaaaaaaaaaaaaaaaaggaatcccagcaatccaaggcggaattctagaaatagtttcccgtagaaacaccgttctacactgcagtcttattctatcccactattattactcccaaagattctaaggtcccagtgctttcgcttcatcctagaggctaaatgggctcccctggactcgcctggcagaactaaccacctagaagaacgttattgtaagggggaaatgtgagtgctacataagtttcttataaatgtgcttttgaaatagagtccactcttaagtttgatatttcctaaaatttaatgtgtgaaggaagatgcttgggagacaatccgtttatcaggctgatatatggcagatagtctactgacctccctgagcaagaaccttaggaatgaggccaggtggcagaaacactcagggccaagggtagggagcaaaactgtgatgtaaagagacctagatggacttgggaggaggtggggttcaataggaggccacgactaatgccctggcatgcaaaggctggacaggagtcttgaaagagcctcaattagctgggcgtggtggcgggcgcatgtagtcccagctactcgggaggctgaggcaggagaatggcgtgaacccgagaggcggagcttgcagtgagcctagattgcgccactgcactccaacctgggcgacagagggagacaccatctcaaaaaaaaaaaaaaaaagaaaagaaaagaaaagaagaaacaaagagcctcaaaaatatggaaaaccagatcctaagagcaaaatgccaagggggacacttattagtgaggagtctgcaaaaacagaaaggttttagccagaagcttataggagtagacctggaacccaaattgaaaaggaacagtgcgacccgtaatttgagaaggaaatagaataggcagaagaactacagaaactatagcttcgagtctaagagcctatttacaggggtgtccaatcttttggcttccctgggccacactggaagaagaattgtcttgggccacacataaaacacactaacactaatagctgatgagctaaaaaaaaaaaaaaaaaaaagaaaagaaaagaaaagaaaaaagaatggccgtgcataaatctcataatgttttaagaaagtttacaaatttgtgttgagccacattcaaagccatcctgggcctcatgcagcccgtggaagcttgcataagagagagatttaggaccttttggcggaagtgctcgataaggattgaatagcaccataaactgaagctaaactgaaaggttttagaatttaacttaagacacctcaaatgcttttagatgaaactcaggacttttcactgtagtaaagttcagcgtgaaattgaccttgtaggggcaccagacagcagtgagcagggtgtataagagtgagggaggggttaataaatagagatggtgggaaaaggagctggcttttcgtgagttcagcttcttgcagactagactagcaagagtcaagaatgaacctaagccagactcaggtctactgggcagtgctaggcctgtctcaaccctgtttgcacatcaggtaccccatgcgtctgctgtagtctgtagctacatgggaacctaaaacatcaccgaggtttctagtgatgttgaaactcagctaataaacagggaatcccgagggttcccctctactccactcctgacagtggccatcctgcctctgcttgaataccttaactcgcctctcatgaggcacccatctcctcattaaatgattgtcactgggaagaatccgccccacacagccagatcaaatttaccccctggtaactttcagcccctggtccccattctgctctttagcactaggtagctgaatcgaatctttccatgagagtcaattccattcctcctaaatcttctctcttctaagataaatagtccacattatacaatcttaatacccaattcaatgagcacttcatgatagtctaatatatgcaaagcaccatgcttgtgccaagtgggaccctaaagcgaatattatctccttgctctttaggcaaacagggtgaagacaagaggcataggtgatggacactaaaacaaagaccgtaagtactgtaatagctacacacaacttacaatcatataggcatggggaaagagtagcccagcttaccttggaggatctggaaaggttctaagaagaagtggaattgagttggagttggaaagacttcaacaatcagatgtgagaaggacgtgggtggtgagtgcaaagaaaataggacacggctgaggaccttgttttctttttcttttttgaggtttttttcttcttcctttgtttttcgttttatttttatttttcattaacaagtagtaataatacatgtttatggagtacaatttgatgttttgatataggtttacaatgtggaatgattaaatcaggctaattagtaaatccatcacctcacaaacttaccaattttttgcagtaaaaacatttaagatctacttttagcaattttgaaatatacaatgcattattacttattatagttaccatgctgtgcaattgattagtaaagcttattcctcttgtctaactgaaactgtgtagccttttcccaaccaccgctccacccccagtccctggtaaccaccattgtactctctacttctatgagatcaactttctcagatcctacctatgagtgagatcgtgcaatatttgtctttctgtgcctggcttatttcacttagcgtagtgtcctccagattcatccatgttgtcccaaatcacaggatttcacccctgtttaaggctgagtagtattctattgtgcatatataccacattttctttattcattcatctgttgatggacacctagattgattccatatcttggctatggtaaatcgtgttgcaatgaacatgggagttcaggtgtctcttcaacatactgatttcaatgcctttggataaatacccagaagtgggattgctgtatcaggaccttggtttcttagcttctgtctgaccttgagcatacctaaaataagagccctgaacgagataatttctaaagtttagtgatagagaccaaaaggagtatacgtctgagcattccaacttaggccaaagcctaaaagtgagaagcctgcccatatcaagggagtgaggtgtgtgtttggggcaggggtagtagaagagcaagacggttcatgaattcagtattcttgtttcactgatgcagcacccatcaccattctgatcaggtcccttggggacatggacagtgtccttagaatgacaatgatgatggtaccaccagcaccaccaccaccatttctctagcatgtgggtgagccaaacacctttggaaacaccttacatatttacatttacatcctactgaatcctcataacagccctgtgagatagatagaatttttattattctcattttacaaattagaaagctgaggcacagaaaggttaaataacttgcccaagtccatagggctaatctaatagcagagctgggatttgaaggcaagtagtctcactccctgcttttcttcctcgaaaaacacaagggcagggctgaactcagctcaggggacacaatctataccaggacaaggttacaatggccctataacttcttcttcttcttttttttttttttgagacgaagtttcactcttgttgcccaggctggagtgcaatggcgcaatctcagctcactgcaacctccacctcccgggttcaagcaattctcctgcctcagcctcccgagtagctggggttacaggcatgtgccaccacacccggctaattttgtatttttagtagagatggggtttctccatgttggttaggctggtctcgaacttccaacctcaggtacccgccttggcctcccaaagtgctgggattacaggcgtgagccaccatgcccagccggcaatataacttcttttgcattctcattaactcagcctcagacgacactggcttccttggaagccactgcatactgatgattgaagtggagctgacaatcacctaaaaacccctaaatgcctttgacatgagccactcttaagccaggtctctcccattctgttcacgtgtggctgatcagttcaaactaaatgttgggttttacgttgaaccctatacaattctaggttttagcttatagtttcaccctactataattttgaaacatgatatgttacctaatgttacctctcccggtttagtaataacataaacaaaaacagttgacagttatgggggccctgactttgtgccagacaccctgctacgtatttgtttgtttaatgtaataccttatataatcatttagtctttacacaaagttaaatattattattattctcacttaataggataggaaaccaagtctagtgaagttaagaagcttgctcaaaatccaattaggggctgggcgcagtagctcatgcctgtaatcccagctctttggaaggccaaggcaggtggatcacctgaagtcaggagttcgagaccagccaggccaacatggagaaaccccatatctactaaaaatacaaaaaattagccaggcgtggtggcaggtgcctgtaatcccagttacttgggaggctgaggcaggagaattgcttgaacccaggaggtggaggttgcagtgagccgagatcatgccactgcactccaacctgggcaacagagcaagactccatctcgaaaaaaaaaaaaaataaaatccaattaggaagggactgacccaagagtcatacctaggattatctgactccagggcctgaacttttatctatgttctctgcagcgtcctcacatcttctacacacttgttattatctaagtcaatcatgaaaaatgatgaaacaggccaggcgtgttggctcacacctgtaatcccagcactttgggaggccgaggcgggcagatcatgaggtcaggagatcgagaccagcctggccaacagggtgaaaccccatctctactaaaaatacaaaatgagccaggcgtggtggcatgtgcctgtagtcccagctactcgggaggctgaggcaggagaatcgcttgaacccaggaggcaaaggttgcagtgacctgagatcacaccactggactccagcctgggcgacagagcgagactccatctcaaaaaaaaaaaaaagaataaagaaaaatgatgaaacagaatcagggagagaattcagaggaaaatgacatccctccaggtgtgtatgaaccaattactcatagagtcataaacagttagagaatgaggcatttttcacaaaatattgagggctggagaggttgaacaatttgctcccactcacacatctaggaaagagaggagatggaaaagtaaacaatccagaaaggtcaaggccctcattccatcaatgcacaattcaagtacacatacgtgggaaaccatctgaaaagttttgtaattacaatttcatctagccagcaattctccaactcattcacatgcatctcatgacatcgttgtcagaagccttgctagagtgaacgtgcacttcatcaaacacacccctgatccgtgggagatgggattcgtttgtgctgatctactctccaggaacacaagaaactcaccattctaacggttcataaatcatccatttaataccccagtttcagattttgcaggaattaacatcaatgcacggtttttgagacccgccaacttgctgaaacagtgcaagccacctgcagtcctcggataccactcagtgatggccctaggtctccctactctgggcctgagattcacttacagctgcaaaacacacctgtgcactctcctcataggcagaacgctttcacttctcagtcatttccaactgagactgttttctctggtagagaatacagaagtcaaatggactcagagtggttctgccttgtctctgccttctgttgttgagaataaaccagaaaaatcccttcttctgtcattaacattttcaagaagctccgttcagtccagtgctcttatttcaggcctatcacaccctttcatatttgtgttttcatagccactgacaaagactgtgtccttgaccaaactttagtcaggttcctctgagcccaatcaggccccatccttgggcatgcccccacccccaatgtctgatcaccctcaaaatctgatcaaattcctcatccctcatcatccccgaggcgatgtctgatcaccctgcctggtcttcagcaaaaatcacactaggtcaacttagccagaatcccctgactcccaatgtttccccttagtaattttccacccactgaccccaccttattccttggttacaaatccccatttgcctctgctgcattcagagttgagcccagtttctctccctgaccacaagaccctattgcagtggtccgtccctacaccaactgcgatagtcccggataaaatctgccttacccttttaacaagggtcaagagtaaatttttccttaacatctcctgtgggcactatttgtatacatttaaagtgagagcttatccaagagcttcctttttagcctggcaatcaagtatcctttttgcttctttctcccgatcactccctaaacccctcatctatagtaagaagcagaatcagaatttgactccaagactgtgcctgaggagcctgagccctaaatactgtgctctattgttacctgtgttatctgtaaataactgagccattgattaaaacacagttaataggctgggcacggtggctcacgctcactcgtaatcccagcactttgggaggccaaggtgggcggatcaactgaggtcaggagttcgagaccagcctgaccaacatggtgaaaccccatctctactaaaatacaaaagttagctgggcgtggtggtaggcgcctgtaatcccagctactcaggaggctgaggcaggaaaatcgcttaaacctggaaggcctcggaggttgcagtgagccgagattgcgccactgcactccagcctggacgacaagagcgaaactccatctcaaaacaaaaacaaaacacaatcaataacagaacctagagatctctagctagatgcatctcaatcaattaagcatgcaatcaaagagactgaaggggacctgaggtccagataatttaagtgatttaaccaacgttaaagattatttcttaaggggaaaatcatgactctcacatgatataaaagaacatgtggcaaatattttatttaactaatttaactggagccagcaaaatattaaaaccagctcaaaggagaaaactccaactaccacacatttatagtcagataagaaataccgaaataaatttacaaacaggcaaaactggaaaaactggttaatatctacaggacaataaacaaaggcattccacgggagactatttgcattataatatgcaaggaattatttgcattacgatcagttttctatatgttaacttctttctaaggagttgtaaaatagcataatcaaaagcaaataaataagcatatctctataaaatcagataatccccaaaggctctaacattccattgaaaggatatccagtaatctctttgcccattgcaaatctttccatttttccctacgccaaagtcaaaaagcagtaatagcaactccagaaaagaggtgaagagagccgggctcggtggctcacgcctgtaatcccagcactttgggaggccgaggcgggtggatcacctgaggtcgggagttcgagaccagcctgaccaacatggagaaaccccttctctactaaaaatacaaaattagctgggtgtggtgacacatgcctgtaatcccagctactagggaggctgaggcagaagaattgcttgaacctgggaggcggatgttgcagtgagccgagatcgcaccactgcactccagcctgggcaataagagcaaaactccattaaaaaaaaaaaaaaagaagtgaagaacatcaacaaactgggctgcatctgaaccatgtgaagaagatggtcaggtttagtggttagcgtcatgggccttaaagacagtgcctgggctccctcaaattccagctttgcctcatgtgctcgtgtgaccctgggaaattttacttaagtcttttgtgtgtttgtctttttttttttttttttttgagatggagtctctgttgcccaggctggaggagtacagtggctccatcttggctcactgcaacctccccctcctgtgttcaagcaattcttttgcctcggcctccccgagtagctgggactacaggtgtgtgccaccacgcccagctaaatttttttgtgtttttagtagcgacgaggtttcaccatgttggccaggctgttctccaactcttgacctcaggtgatctgcccgcctcggcctcccaaagtgctgggattacaggcgtgagtcattgtgcccagactcttttttttttcttttttttgagacggagtctctgttgcccaggctagagtgcagtggcatgatgtcggctcactgcaacctccgcttcccgggttcaagcgattctcctgcctcagcctcccgagtagctgggattacagtcatgtgccaccacacttggctaattttgtatatttagtagagacggggtttcagacggggttggccaggctgttctgtaacattctaccacaaaagaagtgaaaatggcctgttcctgccttaactgatgacattgtcttgtgaaattccttctcctggctcatcctggctcaaaagctcccccactgagtaccttgtgacccccactcctgcccgccagagaacccccctttttcctttacctacccaaatcctataaaacagccccaccccatctcccttcactgactctcttttcggactcagcccgcctgcacccaggtgaaataaacagccatgttgctcacacaaagcctgtttggtggtctcttcacaccgacgcgcatgaaatttggtgccatgactcagatgggggacctcccttgggagatcaatcccctgtcctcccactctttgctccgtgagaaagatccacctatgacctcaggttctcagaccaagcagcccaagaaacatctcaccaatttcaaatccagtaagcggcctctttttactctcttctccaacctccctaaccctcagcctctttctcctttcaatcttggcgccacacttcaatctctcccttcttttaatttcagttcctttcattttctggtagagacaaaggagacacgttttatccgtagacccaaaactccggtgccggtcacggactgggaatgcagccttcccttagtgtttaatcattgcaaggacacctctctgattattcccccacgtttcagaggtgtcagaccacacagggacgcctgccttggtccttcacccttagcggcaagtcccgcttttctgggggaggggcaagtaccccaaccccttctctccgtgtctctaccccttctccacctttctggggtgcaagaaacccccaaccccttatccttcacccttagcggcaagtccggcttttctggaggagaggcaagtaccccaacctcatatctctgcaccccaatcccttatttctgcaccctgacctcatatctctgtgccccaatcccttatttctgcaccccaacctcatatctctgctccccgatcccttatttccatgccccaacctcttatatctctgcaccccatcccttatttccatgccccaacctcctatctctgtgcctgaccccttctctgcttttctggagggcaagaaccccctaccccttctccgtgtctctactcttttctctgggcttgcctccttcactataggcaagcttccaccttccattcctccttcttcttccttagcctgtgttcttaagaacttaaaacctcttcaactctcacctgacctaaaatctaagtgtcttattttcttctgcaatgccgcttgaccccaatacaaactccacagtagttccaaatagccagaaaacagcactttcaatttttccatcctacaagatctaaataatgcttgtcgtaaaataggcaaatggtctgagatgcctgatgtccaggcattcttttacacatccgtccctctctagtctctgttcccaatgcaactcatcacaaatcttccttctttccctcccacctgtcccctcagtcccaaccccaagcgtcgccgagtctttctaatcttccttttctacagacccatctgacctctctcctcctcgccaggccgagctaggtcgcaattcttcctcagcctctgctcctccaccctataatccttttatcacctcccctcctcacacccggtccggcttacagtttcgttccatgactagccctccccctcctgcccagcaatttactcttgaaaaggtggctggagctaaattaaagttaatgctcctttttctttatcccaaatcagatagcgtttaggctctttttcatcaaatataaaaaacccagcccagttcatggctcgttcggcagcaaccctgagacactttacagccctagaccctaaaaggtcaaaaggccgtcttattctcaaaatacattttattacccaatctgctcccgacattaaataaaactccaaaaattaaattccggccctcaaaccccacaacaggatttaattaacctcgccttcaaggtgtacaataatagaaaaaagttgcaattccttgccttcactgtgagacaaaccccagccacatctccagcacacaagaacttccaaaggcctaaacctcagcgtccaggcgttcctccagaacctcctccccgaggagcttgctacaagtgccagaaatctgaccaccaggccaaggaatgcctgcagcccaggattcctcctaagccgtgtcccatctgtgcgggaccccactggaaatcagactgttcaactcacctggcagccactcccagagcccctggaactctggccgaaggctctctgactgactccttctcagcttagcggctgaagactgacgctgcccgatagcttcggaagtcccgtagaccatcacagatgccgagctttaggtaactctcacagtggagggtaagcccgtccccttcttaatcaatacggaggctacccactccacattaccttcttttcaagggcctgtttcccttgcctccataactgttgtgggtattgatggccaggcttctaaacctcttaaaactccccaactctagtgccaacttagacaatactcttttaagcactcctttttagttatccccacctgcccagttcccttattagactgagacactttaactaaattatctgcttccctgactattcctgggctacagccacacctaattaccaccttttccctcagttcaaagcctccttcacatcctccccttgtatctccccaccttaacccacaagtataagatacctctactccctccttggcgaccaatcacacaccccttaccatctcattaaaacctaatcacccttactccgctcaatgccaagatcccatcccacagcacgctttaaaaggattaaagcctgttgtcactcgcctgctacagcatggccttttaaagcctataaactctccttacaattcccccatcttacctgtcctagaacaagacaagccttacaagttagttcaggatctatgccttatcaaccaaattgttttgcctatccaccccgtggtgccaaacccatatactctcctatcctcaatacgtccctccacaacccattattctgttctggatctcaaacatgctttctttactattcctttgcacccttcatcctagcctctcttcgctgtcacctggactgaccctgacacccatcaggctcagcaaattacctgggctgtactgccggaaggcttcacagacagcccccattacttcagtcaagcccaaatttcttcctcatctgttacctatctcagcataattctcataaaaacacacgtgctctccctgctgatcgtgtccgattaatctcccaaacctcaatcccttataaaacaacaactcctttccttcctaggcatggttagtgcagtccgaattcttacacaagagccaggaccgcaccctgtaacctttctatgcaaacaacttgaccttactgttttagcctagccctcatgtctccgtgcagtggctgctgccgccctaatacttttagaggccctcaaaatcacaaactatgctcaacttactctctacatttctcataacttccaaaatctattttcttcctcatacctgatgcatatactttctgctccccggctccttcagctgtactcactctttgttaagtcccacaattaccattgttcctggcccggacttcaatctggcctcccacattattcctgataccacacctgacccccatgactgtatctctctgatccacctgacactcaccccatttccccatatttccttctttcctgttcctcaccctgatcacgcttgatttattgatggcggttccaccaggcctaattgccacacaccagcaaaggcaggctatactatagtacaagccactagcccgcctcttagaacctctcatttcctttccatcgtggaaatctatcctcaaggaaataacttctcagtgttccatctgctattctactactcctcagggattattcaggtcccctcccttccctacacatcaagcttgaggatttacccccacccaggactggcaaattaactttactcaacatgccctgagtcagataactaaaatacctcttagtctaggtagacactttcactagataggaagaggcctttcctacagggtctgagaaggccaccgcagtcatttcttcccttcagtcagacataattcctcagtttagccttcccacctctatacagtctgataacagacgagcctttattagtcaaatcagccaagcagtttttcaggctcttagtattcagtgaaacctttatatccattacagtcctcagtcttcaggaaaagtagaacagactaaaggtcttttaaaaacacacctcaccaagctcagccaccaacttaaaaaggactgaacaatacttttaccactttcgcttctcagaattcaggcctgtcctcagaatgctacaaggtacagcccatttgagctcccatatagatgctcctttttattaggccccagtctcattccagacagcagaccaacttagactgtgccccaaaaaacttgtcatccctactatcttctgtctagtcatactcctattcaccattctcaactaatcatacatgccctgctcttgtttacactgccagtttacactgtttctccaagccatcacagctgatatctcctggtgctatccccaaactgccactcttaactcttgaagtaaataaataatctttgctggcaggactatgctgaatctccttaggcactctttaatcagatgtcctaggtcctcccaattcttagaccttttatacctgtttttctccttttcttattccgtttagtttttcaattcatacaaaactatatccaggccatcaccaataattctaaatgacaaatgtttcttctaacagccccacaatatcaccccttaccacaaaatcttccttcagcttaatctctcccactctaggttcccacgccaccccaatcccactcgaagcagccctgagaaacatcgcccattatctctccataccacccccaaaaattttcgctgtcccaacactttaccactatttcgttttatttttcttattaatataagaagacaggaatgtcaggcctctgagcccaagctaagccatcatatccccgtgacctgcacgtacacatccagatggccagttcctgccttaactgatgacattccaccacaaaagacgtgaaaatggcctgttcctgccttaactgatgacattgtcttgtgaaattccttctcctggctcatcctggctcaaaagctcccccactgagtaccttgtgacccccactcgtgcccgccagagaacaaccccccttcttcctttacctacccaaatcctgtaaaaccccatctcccttcgctgactctcttttcagactcagcccgcctgcacccaggtgaaataaacacccatgttgctcacacaaagcctgtttagtagtctcttcacatggacatgcatgaaactgacctcaagtaatccacctgcctcagcctcccaaagtgctgggattacaggcatgagccaccacgtgtggcctgtttgttttttgagacagttctgtcacccaggctggagtgcagtggtttgatcactgcagccttgaactcctgggctcaagtgatcctcccacctcagcctccagagtatgggactacaggcatgcagtaccatacctggctaatttttttgattttttttttctttttttgtagagatggggcctcactatgttacccaggctagtctcaaacacctggcctcatgcaatctgcttcccaaaagcacacccaaaaggtgtgagctaccatatcccacctacttaactcttttgtatctcagtttcttcatatgtaaaatgggcataactgtcgtgcctactacacagctgagttaataattggcatggactcagtaaaataagaactattattgttaggcctctttggagccatggccacaacagcatgcctatctttactctaaaaattttgcccaactaggctcagaattctctctcaaccatctccaattttacagtaaaatgaacattctgtctccaaggttcccattgcttctatgagaccaaccagtgcctctttgtcagccaaatgcaaggatagaacaatgtttatcaccgtggcttcctttgacttaagagatggtattagcagcaagtgtgaaatgacctatgtttatcaggagtcttccatggaagtcatggtagtcagatctcctatcacgattacctcctgccttggtgcagggcgtgatctctgtactaagaacgtctttctccatctcatctctggccaggccagttatagcaacacagcactatcacttcaatccttctattattttgtcttcactcaaaccacagataagaggatcttcctacaggtataggggagaagaaaatttatttttcctctaccctcctaggttttttggctggggccctgcaaattagactgacgaaagatagattaacaaaagaaaaacagacagaagtttattattaacacatgcatacacacaggatcgctcaatgatgagtgactcaaaggagtggtcagaaattgggcttatagagcaccttttaaaaaaatataaatttgtaaaaaagtgacaagacaggccgggtgcagtgagtggctcacgcatataatctcagcactttgggaggccgaggcaggcggatcacttgaagtcaggagtttgagaccagcctggccagcatggagaaaccctgtctctactaaaaacacaaaaattagctgggcatgatggcgtgcacctgtaatctaagtgactctggagactgaggcaggagaatcgcttgaaccggggaggcggaggttgcagtgagcagagattgcaccactgcactccaggctgggcgacagagtgagactccatctcaaaaaaaaaaaaaaagaagaagaagtgacaagacaaagggaaagagctttaggcttctggaggtggcaaactgtgggaaggtaagtagatgggaaaagtaatggaagataaagattgccttagtgaggttggttatgtaggttcctccagcgccatctctgggctgcttaagagtccagagttgtctccagcgactgagaatcttcctgtcctccctggtagggagacatggggagcagagagtttctctttgtttctatttttttttttttttgaggcgaagtctcgctctgttgcccaggctggagtgcagtggcacaatcttggctcactgcaacctctgccacccaggttcaagcgttctcctgcctcagcctcctgagtagctgagattacaggcacccaccaccatgcccagctaatttttgtatttttagtagagatggggtttcgccatgatgaccaggctggtcttgaactcctgacctcagatgatccacccacctcggcctcccaaagtgttggaattacaggcgtgagccaccgcacctggccgagagtttttcttgtgtctgcttcatcttcattgccttcagctcaaaatgatcttaaggttaaagtgttgtactttggggagtggcatgttgaccccttcacagatgttcttcataatgaatagtgcttctcctctgctccgtttcccaaatctttcatttcaaccagtcacagccttttattgctccattccaactctgatcctatttcattgagtttcatcattgatatcaaaacaaggataaatgtcaaaccccagagtaatctggtgtccactctaaaatctgctcatctggcctttcaagtcttctttggttactcagtgatgggcaaaaaccccaacgttttcctgaggatgggctttttatctatattattcaaactcttaggcatttttatctaagatatatttccagtgatgatataaatcaattccagaatcatagattaaagtgaattcaaagcatatataacaatttcaaaaatattcatacccaataattccactctcaggcatcatttctcaggaaacaatagaaaatgtgagcaaagatgaaaagctctaccctgcagcattatttgtaacagtaagcacttgaagacaaacaaaacattattattattattttttttttttttttttgagacagagtctcgctctgtcgcccaggctggagtggcgcaatctcggctcactgcaagctccgcctcccgggttcacgccattctcctgcctcagcctcctgagtagctgggactacaggcgcccaccaccatgtctagctaattttttgtatttttagtagagacggggtttcgctgtgttagccaggatggtctcgatctcctgacctcgtgatctacctgccttggcctcccaaagtgctgggattacaagcatgagccaccgcacctggtgacaaacaaaacatttaaaaatagttggctggctgattatttgatttgatttgatttttattttgatttttttggagactgagtctcgctctgtcacccaggctggagtgcagtggtgtgatcccagctcactgcaacctctgcctcctgggttcaagtgattctcctctggatgaatatttttagtgctatcattcactggaatgatgtcgccactaaaaaattttatttacaaaataagtttattagaagttatgatggctggacgtggtggctcacacctgtaatcccagcacttttgggaggctgaggcagacaaatatcttgagctcaggagttggagaccagtctggccaacatagtgaaaccccgtctttattaaaaatacaaaaatgagccaggcgtggtggcacatgcctgtaattgcaactactctggagactgaggtgggagaatagcttgaacccgggaggcagaggttgcagtgagccgagatcgtgccactgcactccagcctggggaacagagtgagactctgtctgaagaaaaaaaaagaatcatcctgactttccttatagagagggggagggcagagagtttgtcctgtgtctcctttttctcaaagaaaagaagggacgtccaccaaatttttagcagcatttcccactgaatgactgcattatggcaatccttattatgaccctgttttacgagttttctacaacagcatgtctatgtttacaatcgggagaaaagtggtttttgcttttgctgtttaatatctaacatgtgttgtgacctgtccctggccaacttgttaggcgtggagataacatagttgaatgagaggtggacagttgctctcctcagcttccgtgtggggtttgccccttccctgtgttaatagttgctttaccaaaacctttcaggactttttttttttgagacagggtctggctctgtcacccaggctgagtgcagtggtgccatcatggctcattgcagcctcaagcccccggccccctgccaggctcaagcaatcctcccgcctcagtctcctgagtagctgagactacaggtgtgctccaccacgcccagctaactttttatttttttgtagtgatggggttatcaccatgttgcccaggctggtttcaaactccaggacacagtctgtcctcctgcctcagcctcccaaagcgctgggattgcaggtatgagccactgtgcatgaccaagactcttcaggatcctaaatggtttcagcaacaaacattgtttagttatgtaactcagaactccagtatggacatactatgtgatgtgattttattattgcttatatgcttttgtggttttattgtttgtttttctgtttgtttgttttgagacagggtttttgtttttgttttgagacagggtcttactctgtcacccaggctaaactacaatagcatgatcctagcttgctgcccccttgaactcctaggctcaagcaatctttctgtctcagactaccaagtagctaggactacaggcatgtgccaccatgctatgttgtctggctggtgttgaatacctggtctccagtgatcctcccacctcagccccctgagtagctagcactacatgcgtgagtcatgcctggctaattaaaaaaaaaaaaattaagagatggggtcttactatcacagcgtgaatcccaaaattggggttcagtctgggaggccacatgggttcttggcttcccacaagaaggaattcaagagtgagccaacaaagtaaaatgaaagcaaggttattaagcaagttaaggaataaaaggggggctactccataggcagagcagtggcatgggctgtttgattgagtatacgggtattccttgatcatatgctaaacaaaaagtgaattattcgtgagttttctgggaaaaaggtggggagttcccagaactgagggttttcccatttcagacaatatagggtaacttccagacattgccataacatttgtaaactgacatggggctggtaggagcgagtgtcttttagcacaacagtgcattatcattggcatataatgagctgtgaggacgaccggaggttgctttcatcgcatcttggttttgatagatttgggctgctgctttactacatgtcattttatcagtggtgtctttgtgacctgtaccttgcaaaccagtcctgaagaactcttgtctcatcactgtgttgtccaggctggtcttcaagtgatcctcctggcttcagagtgatcctctcacctcagcatcccaaaatgctgggcttgcaggcttgagacactgagccagaccctgtttattcttgaattgtttccagtgaatatatctcatcgtctccccccaaaaaaaggttgcaagtttttggccaggcgcggtggctcacgcctgtaatcccagcactttgggaggtggaggcgggcagatcgggaggtcaggagatcgaggccatcctggctaacacggtgaaaccccgtctctactaaaaatacaaaaaaaaaaaaaaattatccaggcttggtggcgggcgcctgtagtcccagctacttgggaggctgaggcaggagaatggcgtgaacccaggaggtggagcttgcagtgagccaagatcgcaccactgcactccagcctgggcgacagagcaagactccgtctcaaaaaaaaaaaaaaaaaggtggcaagtttttataaaaagagaaaaatcattcttagtatttctttaataccctctacattgacctcactggtgcaaaaaatattagtttgctggtgaaaattcacctcgagttactaaatatctaactttcccataactaccatctgtttgtctcttgtggatctgtttgcctaatatttaaatgacccattcttccccacttttacgaaaatagcattaattcccctttcactattcacacttccttcatcgtcacagtttgaccagcggtccagggtttatgatctcaagcatggccatatatatctatttcacttaagactctggaaagagcataaaatcagatgtaactgtttcctatttcatataatagggaattccatctctaaagttatgacatttggcctttcagtgggtttttgtggtttttactatggctgtgcttagattcctttttgaacacttttccagtggttccacttgaacacaatctttgagtcacataggagaggtgacatgatagagtgtaaagccagaaagagcacgatttggatctcagctcaactgatagggatccgtagcaagatacttcacctctctgagcctcagtttcctcatctgtgcaatgggaatcgtaacgcctgcctctcaatgttgttaagattaaatatgttggccgggcgcagtggcttacgcctgtaatcccagcactttgggaggccgaggagggcagaccacctgaggccaggagttcgagaccaacatggtgaaacccctgtctctactaaaaatacaaaaattagccaggcgtgctggtgcaagcctgtaatcccagaaactcaggaggctgagatatgagaatcgcttgaacccaggaggcggaggttgcagtgcgccaagatcgcaccactgcactccagcctgggcaacagagtgaaactctgtctcaaaaaaaaaaaaaagattaaatatgtgtacagtacctgtaccatgttaggcggtcagtaaacatttgtttaactaacaactgataaggatagtaaagaagtatcagaacacccacctagttatcccaaagggcaggaagagtgctaggtaatggatatagaattccttttagagtcaaattacacgggcaaagatcagcccctccttcaattaaaaagccaggggcagggcgtaataaggaagtggttctccttctttaagcctcttttcaggctgagtcctaaacctgaagaaagtttagagcctggggctctaaactacctgagtctttccaaacgacaagccaagaagacctgttgaaagtttcctcttaagtttcgtggagagagactcaggtatagaaatatccttactgccacctgacctgaagcagaagaaatcacagacagcttccagaccaggtaacaccaggaggcaccagtcttcatcctcagcctttgcaggaggacacagcctggtctttagctgtttgccaaatgaggcagtctaattcagggagctctttactgggtttattacaaagttcttatcatgtaagtctcaggacacaaaatgacattgagaatctagtttagcggggtttccaggaaagacgaagaaaggttatttaggtttctctttcatttctcttttgctacaaagggtttgggacattcagttaagaacacattactggttgaggtatgtgacgttactcagtcttctctgcttatgtatctggggaggtatgcaatgacatgacagccattccgtggccagggacaccactgcccaagctggagaccacgaggattcagggactgaagccagcatgggaattcctggtttgagatcagagtcctgagtacctcgtgggaacttgggcactcatccgcaggaggtctagacccccagagaattccttgagtctaaggcacaggtaaatggaagacccttctctctcctctctcccctctagaaagctccctcctccctgagctccctgtccccttctttccacaatcagagcctcggaccttctgtttggtgaatatgacctgaggctctgtctagcattcagcttctattgtgggaagttaaggcactttctctcattcctcatttcacctttagtattaaagaacagtccaggcagaaggcacgaagagcctgagaggtctgaagtgagggggagaggagaggggcagaaggggaggctccggacaacagaaccaagctgagcttaggatgtgctgtgggaggctccgtggggatgagtgtcagtgcccacgagatccactcaggcctcaactgtgtgtcctgagcacatgaagtcagctcttctgctgggacagccaccaagggattctccacacccctcaccgctgggacaggcagaggcacagcgaaccaggtgtccagcgtaactggggcactgggtggtggccgcctctgtgtgtggaaacacgaggtgcttgctgcagtttcctctgtgtgcttatccgttagctgccacccaccgggagggaagtgaaatctcacctcaacaagtgagtccgcagagcgagaaccgtgcgacagtgcgtctgccaatacctggaatgtaggtgttcgttgcagtgtggccttcccagccggcctctcagcacacccggccaggcagccagtgttcccagaggacacgctggggccagacgtggaggaccccggccacctcggggagggaaagagaccaagaaaagaacctctgtagccttgcttctgagagtgcaggtttgttacaggtaaggatcaggaaggtaaacatagggcagtgaagcagggttgtgtcctctgcggccctgaattagaataagcctcacaggtctcacccaggaacggaaatctcccctccaggttctgaaccagcattcagaggccccacccagggcttctgtcaacataagcataaaacttatggtttacctttccataaaccccaaagttgggcttcttgtatagagtacaatttctgtaggaagagctgaaagcagaagggatctaacctgtgataatactcgatcgctgctgcttgaaagtaagacttagctatacactgaacaatcaagtaatttataacaaggattagaggaaacaaaaactctgtgtttgtgtgggtgggtttttttttttctttatttttgtttcttaagagagtgtctccctctgccacccaggctggagtgcactggcgcgatcatagctcactgcagcctccaactcccaggctcaagcgattctcccccctcagcctcccaagtggctgggactgcaggtgcacaccaccacgcccagctaatttttttcattttttgtagagacggagccaaggctggtcttgaactcctgggcttaagcgatcctgctccctgggcctcccaaagtgctgggattacaggcgtgagccactgggtccggcatctacatttgttaaatacattaaaaccctcttaatcctttgtctccgtttgttctcttttgctccctgctctccaggctcttgtggcggaggcccccgctccctccgctgtagggtagcctccttctggggctggctcctgagcactgttctttctcctctctctcatcctctctcattcttagctttgcctgtcgactgggccaagtcacagcctttctggcctgtaagacaacaaaaatctcacattttactaaatggaaggactaagtactctgtcttgacttcagtggtttccccgatttctgatgttgctgctgaaatagcattagcaagcttgtttcttaaagaagccctctctccagtgacaatactccccccgccacacacacacacatgcacacgcacacacaaacatgcatgcacgcgcacacacacacacaattttaaagccctcgtgttatattaaaaaggtctggatgtttttaacatacatggaaatttcttcagcagcacagtgttactggtctgacgagggcgcacagcctcctacccaaggacacagttcctgaaggaccagggtgcacatctggcctgcagtgccctgagccactctgtccaaaaggaagccttgaatcaaaagcctcatgaatcctctcctgagaaattccatgtctggtctcttgctagactcagccttttccccaccaagtctgccgcacctaattctgacctcaccctgcttggtggcccgctttgcctgcttgcacgcacctcaggtctcagtgtgtctcagcaacagcttcccctcctagggtggccagagttagcaagcaagaatgcaagacagccagttatgtttgaatttcagataaataacaaatataagtgtcttttagcatataatattttatttgggacatatactaatatttattatatattagtctcatgatatttgggacatatactaaaaaattatttgccctttatctgaacttcaaatgtgaccaaatgtgtcctgtattctgaatgtgtctggcagtcctataatcattcattcagtcagtcatcagatatttgagcacctaccatgtatcaagcactattctagagagcccggatagctcagtcagtagagcatcaagcgctactctaggtgctggggaagccagccaaagtcccgccttcatatcttacagtatgtctactttgtttttatatacatgtacactatatatacttgaagatatgtacctttttctttttttctttttattatttttttttgagacagagtctgactctattactcagtgcagtggcaccatctcagctcactgcaacttctacctcctgggttcaagtgattctccagcctcagcctcccaagtagctaggattacaggcatgtgccaccatacctggctaatttttgtatttttagtagagacaaagtttcaccatgttggccaggcttgtcttgaactcctgacctcaagtgatctgcccacctcggcctcccaaagtgctaggattacaggcgtgagccaccgcgcccagcccagatatgtactttttaatggcaatgttaccacatttaatgagattatctttttaaaaaatgttttaatttttaaattttaaaaaatagggatgggatcttactttgttgcctagactggtctccaaatccaggtctcaagtgatcctcccaccttggcctcctaaggtggtgggattacaggtgtgagccacggtgccagccaagatgatcaatacttccttaatatcatctaaaacatacactgtactgtgtttagttctctatcatctcaaagatatctacatctttatacagtatgtttgaattacgatttaataaagatccactcatgacatctaattgatgtctctttttttttaatatgtttcttttttttctttttatttatttatttatttttgagacagagtctccgtgtgtcacccaggctggagtgcaatggcgcgatccccgctcactgcaacctttgcctcccaggttcaagtgattctcctgttgcagtctcccaactcactggaattacaggcacctgccatcatgcccagctaatttttgtattttttttagagacagggtttcaccacgttggccaggctgctcttgaactcctgcctcccaaagtgctgggattacaggcgtgaacgattgtgccctgcctgatatgtttctattctttctttctttctttctttcttttttttttgagacggagtttcgctgttgttgcccaggctggatgcaatggcgtgatctcggctcactgcaacctccgcctcctgggttcaagtgattctcctgcctcagcctcccgagtagctgggattgcaggcatgtgccaccatgcctggctaattttgtatttttagtagagacggggtttctccatgttggtcaggctggtctcaaactcccgacctctggtgaactacccgccttggcctcccaaagtgctaggattacaggcgtgagccatcgtcccctgccggatatgtttcttatgtctcttttaagctgtagcagttctctgtcttcacctttttttggcgccatttatttgttgaagaaaccggccatttgtcttgcagaacttaccagatactgaatttggatagctgccttcttgtggtcattagtttatttctctgtcccctgtatttcctgtaaactgatcattagatccagaggcttgatcagattcggatccaatgtttttggatcaggagacacataatggttgtctcacctttagtgagaccaagattggtcattgggaacagggaagtggagctggggtgagtatagggtcaccagatgtccagtacaagcagaatggacagggctgtgctgcaggatggatgaggggagggtgggatgcccggaaaatgcatgggggagggtgggatgcccggaaaatgcatgggggagggtgggatgcccggaaaatgcatgggggagggtgggatgcccggaaaatgcatgggggagggtgggattggatggaattggggagcgggaaggggtaagtggaaaagcagtaaggaacatgaccttcgaggagacactgacgtgactccttacagagcaaacgatttgcatgtaagtgaaatgcatgtaagtgaatgtgaaattggagcagtggcgggaagaaagattgtccaagccctggaataagacaggaatgtgaagaaacagcagaggaggaggaaggattgcagtcatgacccccacttcatgccatactcctcaagcatttgcttacatccagttatgtgagggaggtttgcggggcttggaagttgtataattgtatctgtgtagttggtctggtgggttttgcaacttgccctttgctgcactgggagggccatttttgtcccctccagcatcacctgatgttgcagcatagcccgctgcatccctcccaggctcacttccatcagaacgcacctagccagggacccttgctttcctggggcctggccaaggagcagttcctcagatcaacagcttcgctatcagccaatgtgagcctcttctaagtaaaggagaggagacagtgatggaaaaaggcagcatccagcaggccctcaggggagatatttcagctcctacacctccttccaatagcagaaccagggggaaaagttagagaatatccttattctatctaacaacttggacaccgaggaacaaaaaggtggcgtgacttgcccaaggatgttgcaggttagaagctgagccagccgtggctatccatccttcagacacccaggccaacttgtctgtaccacctcacattgcctcaaaccctgtctgcagttactgtcccatttctttatcatttggtcctggtatgacaaggtacagtggaaagaaaaagaggaacatgccagccagtccccttaatattactgcagcttctttatcatcacagcagcttacatgccgaaagaccgtcttaaattaggaccagaaagggaagggaacattattaagagccatattaagacagagcctgaggccgggcatggtagctcatggctgtaatctcagcactttgggaggctgaggcaggtggatcacttgagcccaggagtttcgcaccagactgggcaacatagcgagaccttgtctctaaaagacaaaacaaaaaaattagccaggtgtggtggcatgtgcctgtgttcccagctacttgaggggctgaggtgagagaatcccttgagccggggaggttgaggctgtggtgagctatgatctgcactccagcctgggcaacagagcaaaactgagtctcaaaaaaaaaaaaaaaaagagagcctggggcctaggacaacagctgaactagaaaaaaaacatagctaccacttttgaaccaggttctgtgcaggaacttctcttgtgtatcttacacccttacaatatccctgcaagatgactattattatttacaatttgcctgcaggaagttcatgtttggagagatggagtaacctgccacaggtcacaaaactagtcactggcatggccacaatctgaatttgggactgttagactgagaagcccaagctaattcttgatacgctcactgcctgggacatttcacacggtagatctgagctttctcgcatctgagactaaaaggaaaatgtagtccttaacagacagcagaaggaaacagattattagcaaaaagaactgctttcctagcaggaaaccagagaaggagttatttcatgtaagctcaagcaaaggaaattgaacaaaatcagttctttatctatcctgttattcgtatggaaataaagaagaaatgcttgcatcctgttgttttagtgcttgtactgatctttttcaaacatgcctgtgatcacatcactctctactcaaaactttgaacagctctccattgcctccatcagtgtgtttcaaattcgtaaaaagtaaaataaaataacaggatgcttttttcagatgaaatcttacatggcataccaaatatagcaagaaaaaagaaagagagagagagaggagagagaagccgggacaagctaaagcagagggtagagggagaaggaaccgaggaagggaagggtcaggtcccaggcatttctcttccctgaattggcctccctcttttgccacctccccagcaagacctttaactccacagtccacagctcattttgaaatgtactgatcaacgtgagaaaatgcgaagcttcagcctgatagtcaaagaccaccataatctggacccaagtgctagttcacttattttccctccactattttcaagccctggctatttgcaaactgcatacgtatgctgtcccagttctctcaccactcttcaaacacattctgaattcacctataatctcccctctgcccgccctgttgtagccccaatatccacccacctgtctaactccttctagctttccaaaagctttcacttgcctctttctttgaagctcacctatccctgccttctaacctggctatctgcatctctgttagacctcttacttagttcattagttcattctctctctgttgttttttgttttttgagacggagtctcactctgtcgccaggctggagtgcagtggcgcaatctcagctcactacaacccccgactcctgggttcaagcgattcttctgccgcagcctcccaagtagccgggtctacaggcgtgcgccaccatgcctggctaatttttgtatctttagtagagacgggctttcactgtataggccaggctggtcttgaactcctgacctcatgatctgcccgccttggcctcccaaagttttgggattacaggcgtgagccaccgcacccggcagttcattttctttatgtggagttatctatggccatgtctctcttcccaccctagtaagactgtggcttttccctctctaccctccagcacaaacacaatagatgttcaataaatgtttcctgagttttcacccctgtctctcctaacctgcaaagggtaagtggccctgcatagaagggcacagtgtggactttgttgttacaggcccaacatgtgtagcaccagtgggtgtgacctggaagaaatccccctagatgatgatgacctaaacaccatagaattcaaaatcctcgcctactacaccagacatcatgtcttcaagagcacccctgctctcttctcaccaaagctgctgagaacaagaagtttgtcccagaggggcctggggaattgttcagcaaatgagtcatggacagaggtgtcatggccttgcagaaattcccaatccagtgagaaggccataaaccttggcaagaaaaagtcttcttggaaagcattctttggagtagtggagaaggaagattcgcagagcacgcctgccaaggtctctgctcagggtcaaaggacgttggaataccaagattcgcacagccagcagtggtccaggtgtctttctaacgtggagcagtgcttggagcatgaaggtaggcatctgggatttctttctctcccgcttcctggtttttcccttctttgtgtccagagtggtacatctcttctcatgttgtaaagtggctttagagaaggcatgcgttgtgcctcagctttccaacttattagtgttcaatcataattgccctgcttttctcaagactaaaaggagttgctgcctgggcgcggtggctcacgcctgtaatcccagcactctgggaggccaaggcgggtggatcatgaggtcaggagattgagaccatcctggctaacacggtaaaaccccgtctccactaaaaaatacaaaaaattagccgggcgtgttggcgggtgcctgtagtcccagctactcgggaggctgaggcaggagaatggcgtgaacccagcaggcggagcttgcagtgagccaagatggcatcactgcactccagcttgggtgacagagtgagactccgtcaaaaaaaaaaaaatgactaaaaggaaatgatggaagttaagggtgctgggactggttttctttctccactgtctataaataagcttgtttcccaaattcctagtcctctgtaccagacaccaatataaaagaaggaggctaggcgcagtggctcatgcctgtaattccagcactttggaaggttgaggtgggcagatcataaggtcaggagttcaagactagcctggccaacatagtgaaaacccgtctctactaaagatacaaaaaattagccgggcatggtggcgcatgcttgtattcccagctactcgggaggctggggcaagagaatcgcttgaacctgggaggcggaggttgcagtgagccgagattgcatcactgcactccagcctgagctacagggtaagactttgtctcaaaaaaaaaaaaaaaaaagaacgagccctaaccaggggcttgcttgggctgcctgggccgctgctcttcctaagtcaactcattcgctcagggcctctgtgtttccatctgtacattgggtaccccactctctccacctcgtatggttgatgggaagatcagagagcaagagtaaaaggactcttgacaaagtacaaaccatcctacaaaaacaactgagaagcatttagacaaaatcttccctcagttggacaaaattaattgtacttaatgaaacattttcaccaggcactgaggctcatacctgtaatcccagcactttgggaggccaaggtgggtggatcggttgagctcaggagttcaagaccagccttagcaacatggcaaaaccctgtctctaccaaaaaatacaaaaaaattagtcagacatggtggtgcacgcctgtggtcctggctactcgggaggctgaggtgggaggatggcttgagcctgggaagtagaggttgcagtgagccaagatgatgccactgcactccagcctgggtgacagagtgagagcccatcacgtcgatactctcagcactgtgggaaaccaaggcaggaggatcacttgacaccaagagtttgagatcagcctggcatcatagcaagaccctgtctccattaaaaaattaaaataaaaaaattagcgaggcatggtggcacatgcctgttgtcccagctactatggaggctgaggtggaaggatcacttgagctcaggaggtcaaggctgcagtgagcgaagatcacatcactgcaccccagctctgggtgacataatgagactctgtctccaaaaaaaaaaaaaaaaagacagttgcccttcatgcgcacaccttggcataagcatcttcttccccttcaacaaagcccagtgcccaaagcccagattttttttttttttttaaggtgttttagatggagtcttgctctgtcgcccaggctggagtgctgtggtgtaatctcggctcactgcaagctccgcctcccaggttcaagcaattctcctgcctcagcctcctgagtagctgggatcacaggcgcgcaccaccaggcctggctaatttttgtatttttagtagagacagcgtttcaccatgttggtcaggctggcctcgaactcctgacctcgtgatctgcccaccttgggctcccgaagtgctgggattacaagtgtgagccactgcacccagccgcaaagccagattttaaaagaaaggccccctcctgctgagtttcattggcctgggtaacttgtcaataattagtcaagaggtggcagtaatgtctcagtttttaaatgtgacagtcctggcttgcttggagaatcagcccactcatagacagctttagatcactcactatgatcaaggaaactcccttttcccattagagtttcagatgtttagaacagtgggagttatggtcaggatcatctgagggaacctcatggcacagacaggatgaggaaatgggagtcccacaaaaagggcttaccaaggaaacatccaggaagtagcagagcctggactcaccagaagtccaggcctctccctagacttgtttcatttttacagcaaggcatctgctctctgaactctgcccagctagggcaggtctagggcaagagggagcggccccctgtggtccttccctccacatctgcctccccacccctcagctgccctcacccagccatggcttcttctgccgggggtggcatctgggctctggggcaaagaacagtttggaggcacctaaataggcttttctacttggcctgtactgtggactttgccagcagacagagaaagcttttacagaccttagtcttctggtttttcctgagataaattgcattctgtatttcagtatttactggagtgtcatttgacattttttttattttctaaaatttcaagagaagcttttatttcttttttcagtagggaaagaaaacttttatgtgagattgagaattaaagattacattcaaaaacacttaggtgatgtgttaatgtgctgaatagctgaatagtacctatggctgaataatattctccataaaaaatgaaaaatgattacctcctaagaaggctttaaacacatatttacagcttatcttcccttatcacctttctcctcacgcttgcatttagtcagttaattgtgtgttttttacttgtgttacttgtgtcggttttacattgagcgtgatccaagagagcctcacattctatttctattttgccacatacaaatcaggccttgcaaatttggtttctcctgggttcttttttgtttgtttgtttgttgtttttgagacagagtcttgctctgtcacccaggctggagtgcagtggcctgatctcggctcactgcaacctctgcctcctgggttcacaccattctcctgcctcagcctcccgagtagctgggactacgggcgcccaccaccacgcccggctaattttttgtatttttagtagagacagggtttcatcgtgttagccaggatggtctcgatctcctggcctcgtgatctgtccgcctcagcctcccaaagtgctgggattacaggcgtgagccaccgtgcctggcctcacctgggttattttaactgtaagtcactatgtagccttgtacagccactgccaggcctcagtaccgggcttacatgggaactgtgagattatgtcccaagaccaaactctgttaggaagaggcctcaggatgcagagaaatggacaataacaccagttttaaagactaccaacccaggctctttcacttgtgaatcttttgtttctccatagctacgatttgctcacgtggaatgttatagttaaggtgaggttcagcgatatacagtggaacactcaaatacccatggcttaaataatatacaggtttgcttttctctcctttaaaagaggacaaaagtttggcagctcaggcatgatatgacagctccacaaagttattaagaatttctgggaatggccaggcagggtggctcatgcctataatcccagccctttgggagtctgaggtgggcagatcacttgagccaaagagtttgagaccagcctgagcaacatgacaaaaccccgtctctattaaaaaaaatacaaaaattagccaggcgccatggtgcgcgcctgcagtctcagctactcgagaggctgaaggaggagaatcacttgagcctgggaggcgcaggttgcactgagctgagatcacaccattgcactccagcttggatgacggggtgaaaaaaagaattcctgggaattctgccatccctcagctcgtggcttccacctcaaagtcaccttatattctaaaggtggctgttggggcttcacccatcatgtctacatctcaggcaagaataaaaaggaagcaaaggaagggcaaagggtgccttctttctaggtaattcagctcccttttattttattattattttttaatcttttgtaaagatggggtctgtgttacccaggctggtctcgaactcctggcctaaaatgatggcctcgccttggcctcccaaaatgctgggattacgggcgtgagccaccgcacccagccttagctcccttttcgagagctttcttgaaactgcccccagcttctgacatctcattggcccttccctactgcaagggagcccagggaatatagtttgttcagctgggttcattgctgcccctcacattttagaggtctgttactaaggaagaagaagaaagtggatactgagtgggaaagagcagtccataaggaagtcacaccccaaccccctgccctttctctttaaaacaaatgcctcagaccacaggcgaaatgggaccttccgaccctgttggcctgctcttcctggcgccacgatgacccccaaaacagactccaaggaacagacagcctttctgtcttctccccaccccatccagtgttccctcgcctatcagacaggaccaagtctgacaaggatataatcttttctttttcatgttttaaaattaaaatatccaagatgggaattttaactagagctagtgcatctgtgggaacatgtttgcttatagtttctcctggacatgtctcactccatgtccacaaacccacagaaatcaataccctgctgtaaccccagcactttgggaggctgaggcaggaggatcacctgaggtcaagagttcaagaccagcctggccaacatggcaaaaccctgtctctactgaaaatatacaaaaattagctggacgtagtggcgggagccactacgtcctgtaatcccagctacacaggaggctgaggcagagagaatggcttgaacccagaaggtggaggttgcagcgagccgagatcgtgccattgcactccagcctgggcaacagagcgagactccgtctcaaaaaaaaaaaaaaaaaaaaagtcaataccctgtacacagttagccagattgagtaattttgtacctgttggtgatcttgtggccaccctgccttatgagaggaggaggggacagagcctttgggacccttcatggagcttcttaatgtgcaagatgggcacagggtgctttctggtggtagaaccgcatgctgattaccctagatgagctgcacaaggttgaaaaggcagcagaggcctgctttcctttctcatctcctgaggacatggccagggaagtttcccttggctttggaagatagcctcttgccatttctttctttgccaggggccatgggtggccagagttccagcggaggccggctgggctgcaataaggggattacaaagtggaaagtctgtttcgcttggttcttaaaaaacgaggaggaaagacattgatccttttcttcttgatctttcttctctccgtcattcgcttcttattggtttttgaaccctgtggactaaccatggaaaagatggctttatgagtcagatgtccaccagaggatggcatcatggacagagcagtatcttctgtggcctttccgtgaatggctggagggctgaagggaggacactgaagccttcagcttggaggaatccagggagagggatcaggagccaccttggcagctgcatatgatgtcaaaacctgtttctcttgtggctcagtccctcccaggccccctacttgcctctcttacctccagtgctgtacaaagcccagaagtgccctaggagtttgagcacaccaaccttctgtccaaaacgccactccattactgtcttcaagtcctgtgaattacctaatgttagtcttcaaatgttacatggtaaaacccagctgctccacacggcatccaagacagcttgtacaagcttttaaaagtttaggatttaggttgggtgtggtggtggctcatccttgtaatcctagcactttgggaggctgatgtgggaggattgcttgcgcttaggagttcaagaacaacctgggcaacatagggagaccttatctctagaaaaagaattttaataaattagccaggcgtggtgatgcacacctgtcatcccagctactcaggaggctgaggtgggacaatcgcttgagcctgagagatccaagctgcagtgagctgtgatcacaccactgcactccagcctgggtgacagagtgagactctgtctggaaaaaagtaaataaacaaataaaaggttagaacttagtgacaaatcaacagtgaaaattttaccacccagcaactcagccatgccatctgcccaccccacctcccctcttccccactcaggggcaaaggcgactggtctcttataggctacaacactcactgggccaatgccatttcaccgtcctatctcaaagtgctttattctacaattctgtatgcaaatacatgacgtaactcttttctcagcttgtaaattcttgaaggccgtaagttgtgctgactgcatccttgtttacctataagcattcattgaatgttttccagtagacatggagaggagagaagaggcagaactgtaccagcaacgggagttaggtgttcacttgataatggacttggatgatgaatctcattgccctgagagcagggatatttctttcttcagtgaccaaccccgaaatgcttgtcaaattatcgaatgtcctcctatgcatgtaggggctggctcttagaggtataaagcatgtcgagaaaaaagaataaaaataaaagcataatgagcattccttcaagtaaagagctaagcactcctttttgtgtctcttcccttgcaaaggggaaaggagaccctaattttgcaagacttcaaaaagagtgtgcagaaggccaattgtttcaaggtgacaatcattcctgcatgcacccctcccacatcccggcctctgccaggcaactttcagtcctttctgaagaatgaccctcccccagcacacatactcccaggcagtttccttctattctggcctggtcttttcattccaggcaactttgcataccaatgagccagatgaagttctgggaagggcctctcagcaccattttgtcttgtttcagctgtggaccccaaagtcatttccattgccaaccgagtagctgaaattgtttactcctggccaccaccacaagcgacccaggcaggaggcttcaagtccaaagagatttttgtaactgagggtctctccttccagctccaaggccacgtgcctgtagcttcaagttctaagaaaggtaagctttccttccctgggtggagtgtttgccaggcaggggcgcaggagcatttgtgtatttatccatcccagggctcggcaacttgacagtctccgctgcctggactgagggcttgacagccacaggctgtgggcaatgagctccagcttgagacaccagcccaaggcaagggggctgccccagcaggttgaaaaaacattcccagctctctgctaagtaagaaaggaaagtctcctacagagggagaggaggaaacacaaagcccgcattcagccttgtctgtggcggaaaatgcaatgttagatctgatcatgttaccagtgaccctgggccaatttgcatcaggtacagttggagcgtcaagccagggatttatattataacattgctttagggctttgtgaaaaagcaggggttgtcaggcaccagctatggtgcaagacatggagcagaactgagaagtagtgacaaggctgggtcagttgtcacccaaaccatagcaatagctgagactgtagatcccatcaggctggtggtaactcaaggcactgaggggagagtcaaggggagcaaagccaagtgccactggaagagaagctctgcccggcattcccccaccacagttcttgctcctggctccctccacaaactacagtggaggttgtgatgacgcagcctcattgtctgggataaatacgtgaggttcgttgtctcatgccaagggaatcgaggacatggacacacacaagaagtgagtttagcggcagaggtttaataggcaaaacaaagagaaaggagaacagctctctctcctgcgacagagaggggaacccaaatgtgacttctggcctgcgacagagtgcaccggattttatagacaggtttgaggaggtggtgtctgatttacataggatccaaagatcagttgaaccaggtgtgacgtttacatagcatgggggaagctggccaccccaccctcatcttattacgcaagtgggctttccacttgcccagcgccatgttgtctgctccctagggcacacgtggttggaaaggaaaagggaaaatgcggccgccatgttggacatgcctagtcccaggtggccttttcctattggcacagctgccaacattcactgtgcaagcttttagcttgcttgtctatgtctgcagctcaattttacaggctactctttgttagaaaagaaaatgatttggggctgcttttcattaaaaggaaaaccttcccgagaacttccttaccctcactatctgcctaaatcatttctttttaactcctctaacagtgaggccaaggtggatcttgggtttgcacctccctaaagaacaaggtgaaggttctccctccaaaggtatccgtgtctcccaaccccgatgcagagcggtagccacactaaaggggccacagctgccacagaggctcaggggaccgtgtgaagagctggaggagaggaggaggcctctgagtctgctaaaaaaaaacagtgtgacattttattactatcccacatgggcttgggagatggaatgccacccctaaaccaagctaaagctaagatgacctcatcctctgtgcacaggagaaatacaggcagctgtgccagcaactttccctaagagagtgttaacccaatatatcgagacagatcttactcagtgtagaacttttattttggccgggagcggtggctcgtgcctgtaatcccagcactttgggaggccaaggcaggtggatcgcctgaggtcaggcgttcaagaccagcctggccaacatggtgaaaccccttctctactaaaaatacaaaaaaattagccaggcatagtggcaggtgcctatgatcccaactactggggaggctgaggcaggagaatcgcttcaactggggaggctgaggttgcagtgagccaagattacgccattgcactccagcctgggtgacaagagtgaaactccatctcaataaaaaaaaaaaaaagtagaagaagaaggtttattttgccaagcctgggcacggtggcttacgtctgtaatcccagcacttcgagaggccgaggcggacggatctcttgaggccagaagttcaagaccagcctggccaacatagcaaaaccctatctctactaaaaatacaaaaaaattagccgggtgtggtggcacacacctgtagtcccagctactcgggaggctgaggcaggagaatcacttgaacctgggaggtggaggttgcagtgagccaagatcgtgccactgcactccagcctgggtgacagagcaagactcacatactccactgcaccctgtccccccaacacacaccatacaccaaccgtggccacgttcctatccatctgcccttttagccttggccataggggaatttattaattttacttatttatatcccaccttattgtcaagacccagcatacaaagaataaattttagtcagataaaatccatcaatctgaaagatatctttgtaaaaagaaaacaaaaacaggaaaataagacggatttgggaattaggttaatttccaaaatgtaggccagcaagactatccactctcttagatatgggccacaaatttggctctatactttctagcaactaacccaaagagtgaaatataatcaaatatgagatttatggtgtccataagataaaagcaccatctgctgaggaaaaatccaaaaaccagaagaatattccccctaaatatcttcatagacagaatcctgtgctgtgaaaccgatgtcttcaacaacaagcttaaggtaactacagcgatgaatttcacagtgagagctgggggactgagcaaaggaagaaggggaaagaaggaaaggaaggggctgtaggagaaatccctagtatggtttgtgtctgggcagaagaggcgaggtaagatttacttgataagaatgaacatgcttcttgccaggcacagtggctcatgcctgtaattccagcactttgggaggccgaagtgggtggaccacctgaggtcaggagtttgagaccagcctggctaacatggtgaaacctgggtttctagtaaaaatacaaaaaaattagccaggcgtggtggcacacgcctgtaatcccagctacttgggagactgaggcatgagaatctcttgaacctgggaggcagaggttgcagtgaggcaagatcgcaccattgcactacagcttgggcaacaagagcaaaactctgtctaaaaaataaaaaataaaaaaaaaaaaaagaattagcatgcctcttcctccagcccttaccaagccacaagcattcattgtccctggaaaaatgtaagattattttttgcttctcttaaaagaaataactggaattttccccgacagatgaagaagaacaaatactagccaaaattgttgagctgctgaaatattcaggagatcagttggaaagaaaggtatggaacaccttgaactgatgcgattgatttctgtgcccatgcactagtacacgagaatggaattgtattccaggttgcaaccttattccctttctaagtcctggtttctacttagtcctaaattttatttcccttggagtcaaaattcttcatgctggtagaatctcaaaaatgagtcactttggaaaacataagtaaaccttctggagcctccttggaatttttggaaactaaaaaagaaacttgttattgcaagaaaagacaccagtaaattaaaatttgctggatggaattattaatctcattccccatgtaactgatcctcattgaagtttagactcgcatttgctttgcagcctggatatctgtgtcccacagttgctccaaagctggaatactttctggaatctttttcccctgtagttgctggactgttgcctgtttaagggctctcttagcagttcagccagggaggtgcgctagtgttactgggagaatgtatggatttcctgccatttggaagttgagacccatctttccaatcaggaacgggtgagagttgccttcaggtaaacagttggtgagcaaaccttcaacagagtcaaaagggcttctctatgcctcctgggtccataacccacagacgactgagtagtctctagaatctgtcaatcaggggctggcttgcagacatagacccttgtttttccagaatctgtggggagggagtcagaccctgggggtggggatgggaggttctgcaggaagacaaacagctcctgtctatagctttgtcaaaagtgtgcccagaggctggtgacccagagggcgaagcacctgggagatgggacagaatgagaaacagcgagaaaaccagggatattaggttaaagaaaagagaacggggtgtgtgagctttgggaccacaagtagagggtggagaggggtgcagaggaagcaagagatggaacaggatcatgatttaagggcacccctgcatttctccagagctagtgtcatggatacacaaattatgcctagtatggggtgattgatttctccttatggtaagaatgaacctccattcctggagaataggcattccaggctgcccatgagagtcaacgggtgccttgtgagagaatgatcttcctgtcacgggaagaattgcaagtaggtgccaataccagttagcatttcagcacagaactccgaggggtcctttagacaacctcaagggctctttacaactcagagtttctgtggctctcacggcaacctccttcccagcttccctaagcagggacttgtggtcattggtcagggaggtgggaaaggcggagtgggggtgctggaggtgggacgaaggccaccgatctcaggttatgaagagcgatggtttcattttcacccccacaaattaccactttcaaaaacctcactttgcctggtgctctctcttaaggagtttggacattttacattgcttatggcaaagccttggttgttatttcctttacatgcttccccagtagggagctctgctagagacacatggtaggtgtgaccttgtgctgggcgggtgccaagctcccactgcagagtgccgtgtgtgtggctgcaggggatctgcagagccgctggtcccaagagcacacacagcccgaaggcccatcctacacctccaggagaggccaaagagccaggtgcacccgagagggacaggcaggggaggggtgaggaggtgccagtggaagccctgtctttgtggcgtttgattcttttactgttctggcacagtccccacttggctgcctgctagggttttgagcctggcctcctccattgggaaactgatgaagaggagtctgttccctgttatggaggaggctggccatgcctcctgcagagtcacaacccagacggggcctggacggtgggggtgggcgtggttcagggaaaagacaggtctgccaaaatctcccaatcgcatctgactcatcccccagatatcccttttagaaacaatatttgttgaaaacccgcttggcttatcattcctctaggacagaactagaggattttcaaataaatattttgtccctgctcactcagaaatttccgttttcacatgacaaccagcatattaacagacattgcaagaatgctttaaatgaagatgatatatagctttttgatatgagccctgatttttcaaaagcagaagaggcagcattgattttgttttaaaggcgtggtagttcaaaggaggtaaagcagagagataccaggttcaagggaaggccgggaggtaaaatcaatagggtagaataatgggaaagaaatcaatgaattggagtttttttaagtgaacattgcatgcaagggagtcttccctgacctccatgctcccgtagcatcctgaaaaatgactcgcatttccaaagcacctcttctatgtccagcactataaagtgttcaactaccctatagtatagggccaagcacagtggctcacacttgtaatcccagctcctggggaggccgaggtgggaggatcgcttgaggccaggagtttgagaccagcctgggcaatatagtaagccttgtccctaaaaaacaataataataaaagtttcttaagaaaatgaaggctgggtacgggcacagtggcccacacctgtaatcccagcactttgggaggccgaggcaggtggatcacctaaggttaggagttcaagaccagccttaccaacatgatgaaaccctgtctctactaaaaatacaaaaattagccgggtgtggtggtgtgtgccagtaatcccagctacttgggaggctgagacaggagagttgcttgaacctgggaggcggaggttgcagtgagctgagatcgcgcctctgcactccagtctgggcaagagagtgagactccatctcagaaaaaaaaaaaagaaagaaagaaaagaaaagaaaatgaagactgggtgcagggactcatgcctgtaatcccaacactttggggaggctgaggtgggtggatcgcttaagcccaggagtgggcaacatggcgaaactctatctctacaaaaaaatagaaaaaaattagccaggtgtggtggcatgcacctgtagtcccatctacttgggaggctgaggcaagagaatcacttgagcccaggaggcagaggttgcagtgagctgagaccacaccactgcactccagcctgggcaatgggagtgaaaccctgtcttaaaaaaaaaaaaaagaaagaaaacaattaccctatagtatcaatactatcaccatcctagtttagagatgacaaactgaatctgagaggttaatttccccaagattgcatagctaagtaagaggtggacccaggggtttgagccaagacagtgattcctaagcttcagatcctgtcccttacactacttctagcaaaggacatcacatttttctgcaattcccactagactgtgagccctttgagtgaggacccgcatctcagtcatccatactacctgcccattataagtgctcaggaaatatttgttaaatgtcaaatgaactgactgttccattttatacatgtatttgtgctgatgaaatgaattcaccgagcagtacatgcccattctggttctgcaggacactgccttcatccccattcccttggttgacaccagcatccagggttttccacaggatggtttgatggcctgcatttgagctaaagaatgaacttctgtctgcctcgtggagccaagctactgtactgagtgcttattcttttgtacacagctgaagaaagataaggctttgatgggccacttccaggatgggctgtcctactctgttttcaagaccatcacagaccaggtcctaatgggtgtggaccccaggggagaatcagaggtcaaagctcagggctttaaggctgcccttgtaatagacgtcacggccaagctcacagctattgacaaccacccgatgaacagggtcctgggctttggcaccaagtacctgaaagagaacttctcgccatggatccagcagcacggtggatgggtaagcgtatcctatttaaaaacaaattttctcagaactcagaagagatgggatggattttttttttttttttaaatgaagggaacacatctatgaagcagttctcatgagtttaggacacttgagtggccagagatagatcccattgatgggaacatatttttagtgattatcttcatcatcaataaatatttactgagctctccaagggtatgcagggtatgtgtggatggaaagggactggtcagatggaacaggaaatgaggagatgctgagataagaaatgtttagatagacgtaatttctgttttcacaaattttgcaggcaacggaagtctggcagggagacaagggcaggcagacagttcctcacacttgcagatacttagaggtcacggagactaagcctcatgcagagactcagggttcatggcattttgtcattgctgctttgacccagccattttgagggtgacattttgataccaaataaaaagccaacagttaaactttcatctattttcaattacctggtatcagtcaaaacagacctctttcccttttgcctcaaaccctctcccatccctcatccccagttcctcaggtctccttaagactgccatgttcaaacagctacataaggtccaccgtgtcaaaatgtactaccccacaactttaactctcaacaggcctaggcattcctaggcggacagaccttcatcccacattatccttagttctctttccactagaatggtccaggggccagcaggaggattgagtcggctctaggcatggctggagtgaccctgggacctccacacagccttggtctctttgctgatggaaggaaagtgcagctgatcttgcccaagggtctgaagtgcccgccatggtcttcagtggctgccacggtcttcagtttctgtacattgagttcctttctattttccacttttgcaccaagtttgataaccctaagtggctgatctgaacaaccaaggccattcttaagtattctaaacttaagctgccttagcttattctaaaaggaggacaggttcctcaacattattttagttctacctattcttctttccaggattccttcaccccaacaacccccttgagccctcatctgccccaaagcctctcctgacccttccagctcaaaggctgcacagtctctaatctccagcacttcatgtttgcaccataataatatacaaaagatgatcaaattcccaattgactatgtttcaagcattcattttaaaaatcattgttagtcctcttaatatattttctcagagaaattataattatcaattgggttcacaggctagctctcaaaaatctgtttaacccactaatgtagctaaaataccataaatatgctattaaaaagcagtggttctacaccaaaagcacaagcaacaaaagaaagaatagatacattggattttgttttgtgcttccaagaacaccaccaccaagaatgtgaaaaaaaaaaaaaaacaacccacagaatggggaaaaatacttgcaaataaaatctctaataaaagacatatctaaatacataatgaactattataattgaacaataaaatgtcaaataacccaattttcaaatgagcaatggatttgaatagacatttctccaaagaatatatataaatggctaaaagcacatgaaaagacgcttgtttgacatcttcatttcaacagtaggaaaatgcaaatcaaagcaacattgagctctatccactacagtggctaaaatgaaaaagaaaagcattgacgtcggtgaggatgtggagaaattggaaccttttatgttgctggttggattgtaaaatggtgcagtccctttggaaaaccacttgggagttcccaaaaatgttaactatgaagttaccaattccaggggccgggcgcagtggctcacgcctgtaatcccagcactttgggaggccgaggcgggtggatcacgaggtcaggagatcgagaccatcctggctaacacggtgaaaccccgtctctactaaaaatacaaaaaaattagccgggcatggtggcaggtgcctgtagtcccagctactcaggggggctgaggtaggagaatggtgtaaacctgggaggcggagcttgcagtgagccaagatcgcgccactgcactccagcctgggagagagagcgagactctgtctcaaaaaataaaaaaaattaaaaaaaataaagttaccagttccactcctggatatatacccaagaaagttgaagacatattttcatacaaaaatttgtacatgaatgttcatagcttccattagccaaaaagtggaagcaacccaaatgtccatcaactgatgaatgatgaatggataaggaaaatgtagtatagccacacaatggaatgttattccactataaaaataaagcaagtattgatacatggatgaaccttaaaaacattatgctaagtgagagaaagtcaggcaaaaaggccatatactgtatgattccatgtatatgaagtgtccagaataggcaaatgtatagatacagaaagtagactcgttgctaggagctgagggtgagagaatgggaataattgctaagggatgtgaagtttatttttggagtgatgataatgtcctaaaatcagaggcgatgtttgcataactctgtgaatatactaaaagtgaatatacgaattcactgaattagtgaattttatagcataattatatttcaatcaatctttataaaactagcagttctaattctagtaatcaaaaagaggaaagagaaatgaatgcaattatttttttaatttggctgctggtactggagaaaaaaaacagttccaattagaaaaaaaaaaagatgaattattcagtaggaatactaaagtggatttccaaaggctttagaaattgatggcactagttctttaacatctgtagtttcaattcaaaatgtatttcttatccaagttatcataaaccttaatcttaactcttggccacagttaagtttaatttggagcatgtcagtggaaattaggagaggggagacaaagaatgtgagagggatgactaatttttccaaagggtagaaaaaaataaaggaggatgataaagaatatttatgagctgatatgagctatggaagtgtgaaggacatgtggattggggcgtgtgctcagagtcccttaacgggaaaaaaagaagacaatgggaagtaagcctcctgggacttccattggcaccaagtgtctcgatggctctctctgctgtccttgtagtagtgtgggaggagagaaatctagtcccatgcacaagctttccagaagctcagggttcctatctcagtattccacatttcatatgagtacatctcatcttcccaactaaactgcaaatctgtaagggtgagatcatgtttttatgatggctcctttaatctcccatagctcccattcctctacataacaccatagatgttcagccagtacttgtagaacggtgaatgaatcgatcaaatgaatgaatagcaactctatctacaaggcatgccaaacaagctaccacgagattctgatttactccttggctctttgtgctctctgtggagcaccattcacatagttaccctgcagtcctgcaacctcacccattctgtagcactttgaaaggagagagttgtaaccttcatagtcattgacctttcagtacccacttttattacattttaaatacacccttgaagccctcccatcttcaaggaaagatccagcctgttagctctgggtgtgtaacgtaagaccttagctgatgtcttccttgcaggcataccaagaatgccagtcacctctccaaaccctcccccaaactaacatggtctcctgagcctcgggtcacgcctgggatagagcagagttagcagccatatgttttcacttcaacagtaaatctaacttggaattttaagaacctatttttcccctctaggaaaaaatacttgggatatcacatgaagaagtagactgaaatatcagatttgtcatcaggaatactctttgtctactgtggtcctgtgcacgttggcctcagatggactacaggagattacaacgtacaaggcagatggagcattgacgttttcaaaaccattattcctgtgactggagaggcatcaggagaggtctcgttcgtctccagctcataaaatgtagcagcatcatccttgacagtgatgtttttcaggccctccattgagaacctgaggaaatctgtaaagataagtggtgatgttgtttcaaacgttcagaacagataccatcatcctgcctttgttagctgctgtagggaaagtgcgttacagatgtctgctgacctcacaagagtgaaaagataaactgtgcatgtgtttccacttccgtttctagtactatttatttttaaactacacttggggtggcctaatacctaggaagatgttgctattcacgttagtaaacagcctaaagaaactcttaggtttactgctacatccatttgtttggagaggtaactgttgtctgtgcctttttgaaaaacttccatttggtacaaaatttttactccaacaccccctcaacccttttctcagggaccacacctcttcttcccaaggtccctgggacttcctcattctttgtggtagtacaatgattggtagcaggtaaaataaatacatagaaagactactgtcaaaagagtgtcttctgattagtaagtaataagtcttctgattatcaaatgagttaatttacataaaatgctcagaacacttcttggtacttaatgttaagtcttcacttatggtccctaatgtgtgctgccctcagctaagctgccaatttcctctcctgtcaacgcagtcactgattgctttcctgagattgcggctgttcggtataaggttttttagaaacatgctcaatagtaagtgtttaagacacaaaacaatttaaaaaatactatcaaattataaggtcttacaaatttctggatatgtagtacccagcatatggcctgatgtaaaactggtgcttaataaaactttgaagaacaaacaagtcagtaagtcagacatactctcaggttcaagggaaaactggatctatctattatcaaatgcttcactagcctacccatctcaataaaatgagttattctcttttgttttcttctcccacatgaaagtcatcactgttagggatagaggagtctccattttttgtttgtttgtttgttttgttttgttttgagacagactctcgctctgtcacccaggctgcagtgcagtggcgtgatctcggctcactgcaacctccgcctcctgggttcaagcaattctcctgtctcagcctcccaggtagctgagattacaggcacccgccaccatgcccggctaatttttttttttgtatttttagtagagacggggtttcaccatgttagccaggatggtctagatctcctgacctcgtgatctgcccgccttggcctcccaaagtgctgggattacaggcgtgagccaccacacccagccaggagtctccttttagacatggagacactgaagaccacctcttcctccatccactctgatctcgccattccaaactttttgcagttccccaaaggtattatgcaacctggcacctctgagccttcataacagtatcctctctacttggagtgttcttgcatgatggcttcctttccccctgtttccactaaaacaactaactctagctcatctttccaaatttcctcagtttcctccaggactcatttgctaaccctcccttggccatcatgtggctatatttggatgccttttctcataagatgctccaaatcaccctgcatgtagacattatgcttaatatattgcaccgtaagatttggtttacccagtctttctcagtggattgtaaagtcgtttgcaaacaggtactatgcctaatttaactttatatatctagtgcctggcatagttttggcacacagttgcagaaccataccctcgtctgactgatacagcttgtaaatcagtatgactggaatatgccctaagatatgtgtacttacaacaagctctccatgtgtttccaatatcatctatggcttgtggtcaagatgaagtaactaacgagatttaatctcctgcttgaaacaactaaaaaaaaaaaaagacactatagatgagaatgattttcaaggcattggacattaggtaatttttttttttttttgtatttttagtagagacggggtttcactgtgttagccaggatggtctcgatctcctgacctcgtgatctgcctgcctcagcctcccaaagtgctgggattacaggcgtgagccaccgcgtctggctaggagtctccttttagagaactggtccctgagagatgagactctaagtgagccctatgtttgccctagagtactgcatgcaaagagtttctaggtcatgctggagagaggggaacccacgcagagttcaccagctccctgagtagagaggatagagctaggagtccagaaagatcagagcagctgaagtttgcaagtctgataaaggatgaaagagagaggcacacaaagctccagagacctgcagatatttccccttaggtattcagatgaatactgatcaaaacatgtgcatgaagaaattacccaaggcatggggaagaaccacctgaaaatattaaagggaacgctctccaaagcctacacaaggccatgaatactgcctattttggcaataggtagaatccacaaaacaattttgtctcagaagtggcaaaaattagccctagactaagcactctctggttctgcacaacctaaagattaagagcaaaaacttaaaggattaaactgttaccaaataactgagctgtgttctagaacaaacgcaaggatatctatagaataatcaaaatatccagcatccaacaaggtaatattcacaatgtctagcttctgataaaaaattataaggcatgcaaaaaagcagcaaaatgcaatccatcatgagaagaaaaatcaggaaagctagaatgttacagatgatagaattgttagacattagaactattataactgtattccacatgttcaataagccagaagaaatataacatgcaaagtacacatagaacttataagtatgactcaaaccaaagttctagagatgaaatctataacatctgagatgaaaaacatgctggattggattaatagcagattagacatcatagaagaatggataggtaaacttgaagacatagcaatagatccaaaataaaaaacagaaaaataagattgagggaaaaaacagcaatagcgaattgtggaatgacttctaatgaatggcctatatatataggtataattgaagtgaagattttccaaatttgatgaaaactataaacccacagaaccaagaaattctacaaatgccaagcaccaaaaacagggacagggagaaaactatgccaaggcacaccataaattgctcaaaaccagtgataaagaaaaaaaaaagtcttccaagcaagcagagaaaaaggcatattatatgcagagaaagaaaaattaaaatgacagcaaacttcttggggactaacacaaaagaaacagtaacctctctaaagtatcaagacacacacacacacacacacacacacacacacacacacactataaatgcagaattctatacccagccaaaagatgattttaaaatgtagggaaaatagagattttttgagatgtataaaacctaaaagaattccttatcagcagacctgaactataataaatattaaagaaattccttcagtagaagccaaattattccaaatagaaatctgtatctgaaaaaaaagcactagaaatgataaaatgtgggtaaatataaagaatttttaattaaaagataatatactatttaaaagaaaaaataataatgtgttatggggtttataatgtaaatcaaaatgtataagaataatagtatggagggtgggagacagaaatggaagtgtaattgtacagatccacattatatgtgaagtgtacaatttcacttgaaagtagactgggccaggtgcagtggctcacacctgtaatgcagcacttccagaggcagaggcaggtggatcacctgaggtcaggagttcgagaccagcctggccaacctggtgaaaccccatctctactaaaaatacaaaaattagccaggaatggtggtgcacacctgcaatcccagctgctcaggaggctgaggtgggaagatcgcttgaacctgggaggtgaagtttgcagtgagcaaagattgcgccactgcactccagcctgggtgacagagtgagactctgtctcaaaaaaaaaaagagagagactgtggtaagttaaaaatgtatactctaaacccagaatcaactcctaaaacacacacacacacacacaaactcatacaaaatgtatagctaataagccaacaatggaggtaaaatggaatcacgaaaaataatccataacaaggcagaaaaggacagatgagacagaaagaaaacagcaagtggtctattaaactcaaccatatcaataatcacaataaatgcaatgatatagatattccaattaaatggcagagattatcaaattggattagaaagaccaactttatacacatcttccaaaaaaaaaactttaaatacaaagacatgaacagtcttaggcaaaaggatggatgctttgggaggccaaggtggatggactgcttgtgtccaggagttcaagaccagcctaggcaacttgacaaaacctcatctctacaaaaacacacaaaaattgtgtggtggcgcatgcctgtagtcccagcttcttgggaggctgaggagggaggctcactggagcccaggaggtcgaggctgcagtgaaccacgttcatgtcactgcactccagcctgggtgactgggtgacagagggagaccctgccaaaagaaaaaaaaaaaaaaagtcaaaggatggaaagatgtaccataacacccgtcaaaggaaaatggagtggctacgttaatatcaatccaagtagattcaaagcaaataacgttaccaggtgatatagtttggatgtttgtcccctccaaatcacatgttgaaatatgattcccaattttggagatgggccttgtgggagttgttttggtcataggggcagatccctcatgaatgggagggatccctgaagtaatgcattcacacaagatctggttgttaaagagtctggaattttccccttctctcttgttccctctttcatgtgacatgcctactcccccttccccttctgccatgattgtaaacttcctgagaccctcactggaagcagatgccagcactgtgcttcttgtacagtctgcagaactgtgagtcaaaataaacctctttctttataaatcacctagtcccaggtattcctttacagtaatgcaaaatggactaatacagcagggataaagtcatttaataatagtaaaggagtcaattcatcaaaggacataacaatcctaatgttatgcatctagtaacagcctcaaaatacataaagcaaaaactaatagaattgcagggagcaatatacaaaaatgtttcacaattatagctggagatttcaacatctctcaatgattgataaaaccagtagacagaaaatcagtaaggatagtacagatttgaaaacttggagcattaaaaccaacaacagcagaaaaaaacattcttttcaggtgcacatggacatttaaaacactgaactatcttctggaccataaatctcaataaatttaaaaggattaaagtaatttaaagaatgtttgttgaccacactgtaaataaatttgaaatcaataacaaagatatctggaaaattcctcaaatgtttggaaacaaaacctgtctaaattacccatgggtcaaagcacaaatcaaaagggaaattagaagtatttttaacttaaaaatgaaagcacagcatactagtaattctgagaggcactaaggtagtacttagtgcttcactttagcaaaggaaactttaaagcactaaatagctacattagaaaagaatggtcactaactgatgacttcagcgtataccttaaactagaaaaggcaaatccagagtaggcatgagaaagggaattcaagaaatagaaaacaagaaatagtgaaaaaaatctacaaacccaaaagctggtttgttgagcatatcaataaaaccgctagcttgactgatcagaaaaaaggagaaaatatgaagatattttcagaatgttttcaaaattttgaaaagtagaatgtgtcatgagcagaccaagagtagaagacataccaaaggaaactctcagcctgaaggaaaattatagcagatggaaagtcagatctctacaaaggaataaggagcatcaaacataataaatatgcagataaataaaagtatttttctttacatttaaaagacaattgtttaaagcaaaataataatagtatattatggcatttacaacatgcagaagtaaaacttatgacaataaaaacacaaatgaggccaggttgtggtggctcttgcctgtaatcccccaactttgggaggctgaagcaggtggatcacctgacgtcaggagttcgagaccagcctggccaacatggtgaaaccccgtcactactaaaaatacaaaaattagccatgcatggtggtgcatgcctgtaatcctagctacataggaggctgaggcaagagaatggcttgaacctgcgaggcagaggttgcagtgagccaagattgtgccaccgcactccagcccaggcaacagagcaagactccagcccgggtgacagagtgagactccatctcccaataaataaataaatacacaaatgataggaaaggattctgggaagatggtggagtaggaaacactagaaatctgtctcccacctagacaacaataactcaaacagaatcaatctgaaataactattttggaactctgaagtctattaaaggtttgcaacttccaggcaaaagcttcgacaggtaaactacagttaatttaatcaatttcagctcttagcacaataccagctacctatcccccaactccagtcccatggcaagcaatggtgcacctgttcctggagcagtttgcacacagcttgtggtaagcagagtgcaaaaaaagaaccctgttctccaaatatcagggatctgtgcactgattgctgactcctgctctgatcaaagaggtgcaggtaaagaggtggcagccattgtttgtcagtctgacccattacacctctccccatgactacaagcccctcctcctccagctgaagtgactcccaggaaacttaaaaggcctctgccctctttttctccttttcatttttctccttttcccatttggggagccagaaaatgagactaggattttcaaaagcaactgtatttgggggaaaaatatgaaattgaccttgcatatccaaagagaggcacagactcagaaaagacctcagaagacttaagtttatacctcagggtgatccttggtacagagacagtgtacaacaattaaaaatcaaaaccacacaaacccaaaccacaaaatagcaagccctggggaaggggattaatctgatttccacagttaccatattattagattcaaatgtctatgttttcaacaacaacaaaaaatcaaagcatacaaagaaataggaaagtatgacccaaaggaaaaaaatcaacagaaactctctgaaaaagatctggtggcaaatctactagagaaaggctttcaaacaactgtcttaaagattctcaaaaaagaacaaaaggaacatgtggagaaagtaaaaaaataatgtaaatagcatatggacaaaatagaaatatcaataaagagacaagcaacttaaaagaaaacaaaaagaaattttgaaagctgaaagtacaattaccgaaataaaaaattcactaaacaaatttaaagacagatttgagaaagcagaagaaagaatcaggaaacttggctgggcagggtggctcacgcctgtaatcccagcactttgggaggctgaggcgggcagatcacaaggtcaggagatcaagaccatcctggctaacacggtgaaacaccgtctctactaaaaatacaaaaaattagccaggcgaggtggcgggcgcctgtagtcccagctactcgggaggctgaggcaagagaatggcgtgaaccccggggggtggagcctgcagtgagccaagatcgtgccactgcactccagcctgggtgacagagcgagactccatctcaaaaaaaaaaaaaaaaaaaaagaatcaggaaacttgaacataatgacgcaggatttttcttggcccctttgctgggcttgcagcaggggcacccaacacctcggcctgctgtgctcagcccctggtaggagggagcacatgggcaagcgagtgcagggcttggctggttgctccaagtgccaacacaagagcaagctctatgcaggccccacggccagaccaggtatgttgccctaaggggatcgcaacagtgcccaagcaggggtgccccatgaccccaaatccccagaaggggtgttagtgtgctaattagctcttttagttccactgtccacagcctgatggacggcagcacgttaacagctcagtcagattcttgcccctccctgacccagggctccagaactggcgtggctctgggaccagcttggccccgccactgcttctatcatgtggggaagctgccctccaccgttgagggcagagggccagtgttacagcctttctggccacccacattcagtgagtcccaagctcttgtcctgcatccaagaagaatgaggtcacactgacaattaaagggtggtaaagacagataattttattgagtgaagaaacagctgtcagtggaaagagggtgggaaggtcggattgtctctcctgaagtcagattgtctctctcagtgtggctgaatctgggatttttataggcacaggataagggagtgcatgcttcctggtttgtgagtatgcaagaaaggttaaaatcaaggcaccagtgaaaggtgggcacagtgtaaaaacaattagggaagggtaggtatatgtaaaataggttaagggtagggatcaatcaaaggaaagcacaccaaaccggaagacagtactcaatccaaactgtgaatttgacttgtagcttggcctcaggctttaaactttctttggcttgaatgtggggtttcactggggacctgcccatctgcctaggatttctctgtctcctgcctctatcaataagacagtggaaattatcaagtctgaggaacagaaagaaaaagtctgaagaaaagtgaacagagcctaagggagttgtgagacatcatcaagctgcccaacacaagcattatgggagttccagaggaaaggagagagagagacaaagaggcacagagaatacatgaagaaataatggctgcaaacattacaaatttgaggaaagatatgaatgtaaatatccaagaacctcaatgaattccaagcacaatgaactgaaagagacctaccccgaggcacattataatcaaatgcctgaaagacaatgacagataatcctgaaagtaggatgagggaattgactcatcacatacaaggaacccttagatcatcagcagatttttcatcaaaaactttggatgccaaaggcaataagccaatatattcaaaatgctaaaagaaaacaaaaaaaaaacaaaaaaaaaacaaaaaaatgtgtcaaccaagaatcctatattcagcaaaactattgtattagcttgttctcactctgctataaggacatacccaagactgggtaatttataaaggaaagaggtttaattgactcacagttcagtatggctggggaggcctcaggaaacttataatcatggcataaggggaaacaaacatgtcctccttcacatggcagcaggagaaaaatgagagccaagcaaaggggaaagccccttataaaaccatcagatctcgtgagaacttactatcacgggaatagcatgggggaaactgctcctgtgattcaattacctcccaccaggtccctctcatgacaggtggggattatgggaactacaattcaagatgagatttgtgggggggacacagccaaaccatatcaattatctttcaaaatgagggggaaattaattcccagataaacaaaagttgattgagtttgttagactaggtcacctctgcagggtgaaattaaaggacccttgacagtaactaaagtcatttgaagaaataaagatctcaatgaaggtaaatacataggccactaccgaagctagtattattattatttttttgagacagagtcttgccctgttgtccaggctggagtacagtggcacgatctcagctcactgcaacctctgtctcctggaggggtcaagcaattcttatgcctcagcttcccaagtaactgggattacaggtatgcaccaccatgcctggctaatttttgtatttttagtagagacagggtttcaccatgttggccagcctggtcgcaaacaggtgatctgcctgccttggcctctcaaagtgctaggattacaggcatgagccaccatgcctcaaccaaagctagtattatttggacaagggtttgtaactctactttttgttttctacactttttttttttttttgagacagtcactctgtcgtccaggctggagtgcaatggcgcaatcttggctcactgcaacctctgcctcccaggtttaagcgactctcctgcctcaacctcccgagtagctgggactacagacacatgccaccacacctggctaattttttgtatttttagtagagacggagtttcactgtgttacccaggatggtctcaatctcctaacctcatgatctgcctgcctcggcctcccaaaagtgctggaatttccgacgtgagcccccgcgcccagctcttttttttttcttttgacagagtctcactctgtcgcccaggctggagtgcagtggcatgatctcggctcactgcaacctccacctcctgggttcaagcgattctcctgcctcagcctcctgagtagctgggattacaggcgtgcgccatcacgcccagctaatttttgtatttttagtacagatggagtttcaccatgttggtcaggctggtctcaaactcctgaccttgggtgatccgcccacctcagcctcccaaagtgctggaattacaggcatgagccaccgcgcccggcctccacattgttttctacataatttaaaattctttttttttttttttttttttttttttttgagacagagtctcactctgtcgcccaggctggactgcggactgcagtggcgcaatctcggctcactgcaagctccgcttcccgggttcacgccattctcctgcctcagcctccccagtagctgggactacaggcgcccgccaccgcgcccggctaatttttttgtatttttagtagagacggggtttcaccttgttagccaggatggtctcgatctcctgacctcatgatccacccgcctcggcctcccaaagtgctgggattacaggcgtgagccaccgcgcccggcccataatttaaaattctaatgtgtttaaaataattattagtttatgtttcggggaacatggataaagatataactttgttacaaacaaccaaatggggtggggatggagctataaataagtagattttttggccaggcatagtagctcacacctgtaatcccagcactttgggaggctgaggtgggcagactgcttgagcccaggagttcaagaccagcctaggcaacatggtaaaacctcatctccccactggctgctctgaaaagccatctttgcattgtgcctcgtcagcctccttgctcgccgcagccgcctccgccgcgcgcctcctccgccgccgcggactccggcagctttatcgccagagtccctgaactctcgctttcttttttatcccctgcatcgcgtcaccggcgtgccccaccatgtcagacgcagccgtagacaccagctccgaaatcaccaccgaggacttaaaggagaagaaggaagttgtggaagaggcggaaaatggaagagacgcccctgctaacaggaatgctaatgaggaaaatggggagccggaggctgacaacgaggtagatgaagaagaggaagaaggtggggaggaagaggaggaggaagaaggtgatggtgaggaagaggacggagatgaagatgagggagctgagtcagctacgggcaagcgggcagctgaagatgatgaggatgacgatgtcgatacccagaagcagaagaccgacgaggatgaccagacagcaaaaaaggaaaagttaaactaaaaaaaaaaggccgccgtgacctattcgccctccacttcccgtctcagaatctaaacgtggtcaccttcgagtagaggggcccgcccgcccaccgtgggcagtgccacccgcagatgacacgcgctctccaccacccaacccaaaccatgagaatttgcaacaggggagggaaaaagaaccaaaacttccaaggccctgctttttttttcttaaaagtactttaaaaaggaaacttgtattttttatttacattttatatttttgtacatattgttagggtcggccatttttaatgatctcggatgaccaaaccagccttcggagcgttctctgtcctacttctcactttacttgtggtgtggccatgttcattataatctcaaaggagaaaaaaaaacttgtaaaaaatgcaaaaatgacaacagaaaaaccatcttattccgagcattccagtaacttttttgtgtatgtacttagctgtactataagtagttggtttgtatgagatggttaaaaaggccaaagataaaaggtttcttttttttccttgtctgtgaagttgctgtttatttttttttggcctgtttgatgtatgtgtgaaacaatgttgtccaacaataaacaggaattttattttgctgagctgttctaaaacaaacaaaaacaaaaaaaacctcatctctaaaaaaacaacaaaaaaattagctgcatgtggtagtgtgtgcctgtagtctcagctactcgggaggctgaagtgggaggatcacctgagcctggaaggtggaggttgcagtgagccaagatcgcgtcactgcactccagcctggatgacagagcaagagcctgtctccacaaaaaaaaaaaaaaaaagagaaagaaagaaaagaaaagaaaagaaaaaaagagggagaaagacaaaaccatcaaatttatttaatatgttttatatggtacaggagtcttcatattgaaatgaagacccaaagaaacagataagtgttagtgtgttttgtagtaggtttgatgaagagtagacagttgtggagaaatatgataggacataaagggtatgatctcataataactgggggaaacttagcaagacctaagtttagatttctttgtgacttttttttttttttttttgagacggagtcttgctctgtcacccaggcttgagtgcagtggcgcgatctcagctcactgcaacctcctcctcccaggttcatgccattctcgtgcctcagcctcctgagtagctgggactacaggcgccctccaccacggctggctaatttttgtatttttagtagagacagtttcaccatgttagccaggctggtctcaaactcctgacctcaggtgatccacccgcctcagcctcccaaagtcctgggattacaggcgtgagccactgcacccagccaacactttgtctttagagataagaatgttctcttccaggtgtagagagggcacctctcacacgagagacctgcttaagggaaagatcagaaaacttatcccaggtttataaactgcttcaggtgagaatgatgaaggaatcctgcttccatgatttttctccaattccttcagctcaaaatagtattccgaggtgtcatattttaggtactacgttttgagtcccagtagagaagacacaaattaccaatgtctgaaacaaaaacagacattaaaaggatagagaacgtattttatgtcagtaaatcaacaacttagatgaaatggacaaattccttgaaagacacaagtaactaaagctgacctaagaagagaaaatatgaataacctagattagagaaactgaggtattaaaatttttcctgttacatatgtatctgcagttaggaatcatagcactgcatacttgtggaccctaaccctttccttcccatggaatccccaagaaggaacttcaattactggacaaaagacgagaatcttcaagcctgttcaattgagtaatggtagtgggggagcttttggtaggatgatcagaagtcaaaagacctcaagataatcacttcttgtctgccatgcagcttgtgatgtaagatgggcatcgggctgtctcctttttgacagttattttctttggaaagtgaagcaagggcttagggggaaggaagcatcgaataggtatctccatggaataggataccacataggcgtttgggcttcaatggactctaccttgtaatacaattcattgcctcaaatgcattatgtataagtacctctctagaacaggtattggaattgactaattaaagagtcaagtggtagccagtcgtggtagctcacgcctgtaatcccagcactttgggaggccgaggtgggcggatcacaaagtcagatcgagaccatcctggccaacatggcgaaaccctgtctctactaaaaatacaaacaattagctgggtgtggtggcacatgcctgtaatcccagctactcgggaggctgaggcaggagaatcgcttgaaccacagagtcagaggttgcagtgagctgagatagcaccactgcactccagcctagcgacagagctagattcagtcttaaaaaaaaagaaaaaaaagtcaaccggctcattaaagagttaaggttctgaaaactctacattagggactaataccaagaaatactgagagataaatgagtccagacatgccttgacaattaattacagtggaataaagattaaaatctagacctcaatccatatccttttccctctacccaaagacaacccgtttttctttttcttttttttttttgagacggagtttcgctcttgttgcccaggctggttggagtgccaaggcctcatctcggctcactgcaacttctgcctcctgggttctagagattctgctgcctcagcccctcgagtagctggtattacaggtgcctaccacaatgcccagctaatttttgcatttttagtagggatgaggtttcaccaagtccgtcaggctggtctcgaactcctggcctcaagcaacccgctcgcctcggcctcccaaagtgctgcggctggcgacaacccatttctaatcaaaattttgcagtggaacttttcatactcaaattgggcatttcctgtcaagcctggtcattcatcactttattattctctttattctacaggtaggggtttctctattgaccaggttagtctcaaactcctgacctcaaaagatcttcccgtctcagcttcccgagtagcttacaggctcaagctacgacagctggcaatctttgattattttaagtcggagggcaggaggcgaggaaaggcagcacagtgcctggtacacagtaaatgcaggctagaatgttaataaaattatccttcattttaacttccatattggagaagactggttttgtatgttgactaaatatgaatttgcaaatgcaaatctcaagcagattttctgtgggaggggggactgtgcagattacataatgatataaatggatggaaccagagatctgaggacagtaattcgtcatttgaattaaatttatagaaacaatgcaatcatacacaaggcaacgaattaaaatgaaaactacttaattatttacttagctgaaaacctatctggggaaaaaaggacccaaaacagtttgcagtgtttccccattcgtgagattgcctttccatcaggcaaaccaatcttctgccttttctttctttcatttaactgggaatggcacaacgtgtttctgttttccttctaggaaaaagaatgggaggagtcagcaaagaccaaggtaagttcacttatttgagggcattggctaagggaaaacattttaaaacttggtttccctttaattggtatttgggctcaaatactgcaaaataaaaaagcagctttcctcccttcctatcaaactagtaagctcagtatcaagcagagacctggtatttcactggattttactatgtcctaccctcacagaaaaagaatcatcacatcacactgggctcttcaccaggaaagcaatgtgcattttataagctaatttaagatcctggaaaagagggaagtgctcagagtccatactagaactccttccagtttactgaaaacaagagcagttttgaagcacaggctatttcttattcttgttcccaaacacaaatgctgccagcactgaactaagcaacagcccttcgcaaatctctcttgcagagactgattggctgattgactgatttagagacagggtttcactctgtagcccaaggctgccgtgcaagtggcgcaatcacgagtcttattgcagcctcaacctccccagcttaagtgatcctcccacttcagtcttccaagtagctgggactataggtgtactggcagagtattatttaaaatgcaaacaataaagctgggttttgtgtctgaaacagcgaaggacaaccagctactgtcttaatttcttgctgaaaagaaaggacagacacttttacttttccactgttttattacaaaaatcaaatttcatttgttacaattcagcttatttattgtaataatcaaaaaaggggtttatacaaggtatttttatacagtttataattaaagcacttattttacaaaaggagggaagtgaataagtggacaagggctgaccaaatgttggccattataacataaatacatccttgcaaagcaccatcgtaccaaagtcaatgaacaagaaacaccagttgactttaagacaatgacgaagattaaagcttaagggaaaaaaataaaagataaacatctgaaagcagcaccagatccttcacttgcaaataaggctagtccagtttaatcttcttggtatcctctctactttttaacatttttccttactaatccatatatttaatttcatgtcatattggatttaatcagactttaaaaattttccctttaatacccatatttaggcattagatatatagaatatgtatctatatataaatatatctctatcgcccatcctgcttatatttgactgaaaaacacaaccaccaaaatggacagttcagcaaaagcgcgttgtctgtaattctctggtgttgcttctgggcaaaccctaagtgatggtggagaatctaacagttcgttaggtctgtactctgcttctaaatacaagacatcatttagtttgtaattctatctgtaaagtcatggagatttttttcagcaataaactcaacaatttgagaatgctttatgaaaaagaaaaacagcaaagtttacctcaattgaaagagggtgagggtagagtcagtaactgattaacctaagactccaccttccactccactcaggtacaggctttatgagacgtagatcaagtcagacaatagcctgagagtgtgaattcacaatacttataatttaaattttaaaaaaattataaacgtataattttatacttgaggtccaaagtcttctaccataaaatgttgagaatttcaaaagctaaattttgaaactattataaaatggtgccatcccaaaagtcagaagccacacatgcactacaagtactttctaaaatcatctttcactacaagtactttctaaaatcatctttctcttggttcattttaggcttaagaaataccaaataaaattaaattccttgggtttaagaattctgataatgttttaaacaacacctgactataagcttctttaggactcagtccacacttagtgcatagtctcatctgtagatgcccaaatatttgtccacctactgataactggtcaacacactcatatccatactctaaatcaactatggatgccatatgtagacttaagcaccacacatttattaagagctgacatatttcggatgtgaaaagtccaagatttttgtttctgaatcttgttagatacgtaatgataaccaatatgtaattcctatggcatgcaaatgaatgaagtgggacaaagcttcccctacaagaaataaaacaattcaaaatatgacatttctaagaatctaatctaggcagctgcagcctgtttactgcatagaagtaggcgtgcttaacgcatacctcttcagtctctattatgactactggtatcaagtcacataaataaacacacttcattaacacactaggtaagctacagctattaactctactggaagtattcttcattaatagggctttatagcaaaagaaaaagatgatcctccaaaactgctacctaatacagatgatggctatttttaataccttcaataatgaatgagtttccttcatataaattactgactttaggatatttttaaatgataaagaaatacaaccctcaaaatcatcttaaaattgtactgctcaaagccccttcccccaattactggcctatattagattaaaatgtactttaaagtcttcatttctaagtacctatcatctctgtagaataggtgttctcaaacttactaaagaatcagagatctcttggtaatgtatcacaagctacttttatattaaaattaaagtaactacataatcttctgctaaacagatatcttgtgatatgctgtaagagtggcagaaagtgccaaaggcataataaaatttcatggaagaaaaattaatagtcagaaaattctatccaccaactctctttgtttccctgtgaatgtgctattatctgacttaagcaaacaaaactccttaagtcactattcagaagaccacgactctgttggagcaaagtccaggccttagttataaaagaccacttcaatgcagaatagcttactgtggtgcacacaaagtatgttatgctcaagtttatttcttggacaattttaatcacatcagttagtgcatatattttaggacacatgttcaaaataaatacttttgcatataaggaatctaatgaaacattattcattttcccccttggacaatgaatttaatacaccaaatttaaaaatcccttttcttttttccccctaatttgtgatctcatgcttttcctctcaacttttccaattacagcttgtgtttgataatcaatatacagtttacttaagcttaactgtccatgtaacctaaggctcaataaatctttccaaatttgacaattctctcattaaaaagtactcccagaaatattaagaatccatctcatctaccccagaaagagaacactgagattaggctgaactgccttcaaataattttaaacaaattggcacacaaattagtattttgaagaagaggccattgccatcgcagtgcaagcacgtggactgagatccaacaaggcaatattcttcttagttaattagagtgcaagtctccacatgggaagcccaccagatcaagatgcacatttaaatatgtaaacatatagaattctcaaattctaactgacacccaggtattgctaacctttccatcttcatttaagcatcaagtgccctgtgtatcacagaatccaagttcaatgtccattttgtctgacactgtgggcacttagttccagcaatgggaagagttcatgcttgtctgttttaggattctgatagatttaccatttgcttatatgcaaaatcaagtgcacctgattcttacagtctccaacaatcagcattattctgaaaccacaattttatcttcaaaaactttacttaggtatttttaacttgcatgaacagttacttcacccttgcccaaattctgaatcctttcttccactgttttctcttgggccctgaaacccagagaggccttggcaagacagaattaaaaaagaaaaaaaaaaaattcaataattaactgaccaacacctcttaagctaaaaatacattagtttaaaaccattcaattttagcagagaagtgctacacatgtgtaaaaagcaggaaacgaacttctggcaaggtggcagagcaagtgctagaatcattccacaggtcagccctgatagctcaagatgtagcagccccagtaccatacatgacagcaggtcaggcagatcacaaaagaggcttccattattcccttccacccaaattctgacagctgagaagttaacagtttgccttctcatttaatcctcattgttaaatttgttaaactatcttaatccataatgggtaagagaggacccacataaaaatattgggtgattacaagaataatttgtggataatttgaaaacagcctaacattcacagtgggtaacagaaagatattaaattcatgtcacacattagaagaggtatgtatgtagacattattctgagaaaaaccggtctaaagaacatgaaaacatcacaaactgttaatatagggaaaatcctaataagaaaaaaatctttttaaatagattgtctctaaccagaacatatttaaatgttttactcagaaaacaaacaaacaaacaaaatatatatatatatatatatatatatatatatatatatatatatatatatataaatgatttcgtactgtgatatatgctgaaagtagtgcaaggatatgagatttacaacaaaaacataatggttaaatttttaattcttaaacattgtctatatgtgttgtaaaaagacattttaatgagcattaaaacaatcttggaagaagagaaataatatgtctaacttttgatcattatgcaaaaacagcagtcaaattgaagagctaagcctactggggaatggagctagaagaaatattaaaatcaagtttaatttagaaaattccatttagtcaatgcttcagcttaaaaaaatcatggtatcttagcaaaatgacttaccaagttgctggaggaggcagcaaggtaaacatacctagagaaaaaaattcattttgacagaggtatggattctaaaggtagggacagagacttgcacacacacacagcttcatggcatcttaccagagggctgatctctcctacaacagcaacacccagaatgggtttttagaaatatctactttcctcactagcactgttggattcctagagaaaacaaagcccttcgtccaaggttagtattaattgcatttttttcctttcatcatttcttacttgttggccctcaaatgttagttaactgaaggctatctggctacatccatgtatctatggtttgctgctctgagatggacttaatttttcttcttcctcttttttatttttggtatcaataaagcccagatattcctggtcagtgatgcctttattattcctgtttcctttgtactcagttgcttcactgggtttaaggcatgctttgtgtatttagtttgcaaaaataaaacttttagtacaaattttttttatacaaacttttatggcacaagcagcaaatctgctgttttaagaaaatatataaatatccttttcttctgtacaaatatctccagtattccctaccccattttataattttaactgtacatggtctgcctcatccttctctaatagctccctccccccctccagatctcaaccaaatttatatttacatttttacgttggaggcagtcagaggaggagggcccctcctcaggaggagtctgtacagggagagggtggcggtgggtagaggtgatgagaatagctcctctctgtgtatggagaaggtgggcagctttcatagttctcctctgctgacaagtattggcttcggggtgtgggaggtgggggcacaggttctgaatcatagttcaagtcactggtatagcccttggctgttgccactgaggtcattctccgactaggagcatagtcactgtcacaaacatctgtgctgcagggtgtggtggggggtgcaaagtgccggtagctatatggcctgtagctggtatagggagaaaataaagagaagcagttagttttacaaaaaaaaatgatttcccctctcagaatagaggtattagatgtcaactaccctatgaaaacaataagctactgcaatttaaatttacacagaccaagaggcaattttcaatggcagattcgctgaggaaaatagcaggtactttcttatttgcaaataagaaagtggcaagtgaaaatgaacaggatgggaatgcagaggtgaattcaatctagcctctggttgtgctcttacatcttcaagttaaactgtatcacagaataaaaaatgactattcaaatttgttctgcagtttcatagcccatgggaagaatgggtttttacatattttacactactcaaacatgtcagcattccctcaacattctttactccaaaattaacctgatgaataattaatttaatgacatctgaagtcttcatttctttcttctgtacaattctgtacaatttctgtacagtccaggctggattttggtagacagcctcaggggcataactattccattgttgttatcttagcaaagggaaattgctgtgattgggggaaacggttttcattccctgtgtataggtaagtacctctcataagagcagctttaaacatcaaaatgataaaatttaaatgcccataaagggtcagtgaattttctaatgtatatttcagaggcctagtttatttcttacacttgtttatctttacaagtgacatacagttgttaggtttgtagcactgctaactaaagaaaaaggcattggaaagagagaaacatactagtgaaaataagatctgacctaagttctggcttttctgtcattcctacttctatttttaacttcttatacctgtttattctaaatatggtaaagctgatcttaaatttatcccaaagattttttcataagctttctcatcaaagtgactacaagagaaggggaaaaccaagttaaaaactgatacaacgattcataaaacacctagtgatacagagcaccaccaggtaatatatcccaggaacccaggatacaaaccatttgatatcacttggcttgcttcaaaagaaatggctgccagattgttcacagtcacagatcaaattccttgttctactctgtctccccttcttactactgcatttgattagtctttaaaaaagaaagaaagaaagaaaccagcctgggcaccatagcaagaccccgtctctacaaaaaataaaaaaaagctagccaggcgtggtgacacacacctgtagtcccagctacttgggtggctgaagcaggaggactgcttgagcccgggaggtggagactgcagtaagctgtgattgtgcccctgcactccagcctgggtgacagagcaagaccctgtctcaaaaaaaataaaaataaaaataaaaagggtgcaaggctgccagagaccaaaagttatatgacccactgagtgagttctcaaaggcttttactatcaatactgacatgatgtcacagtttgttttgtttaactctttgtccaatcaggtgtcaatccttggtgaaatttctaaggtcaacatttaaaagtccaaatacttctattttcatgaaaaaaaaaaaagaaaacaaactgaattaataaaattttttcatgtcccagtttaaaccaaaatctcaacaaatgatgtaagttttgactcagaggaaacagaaattgggcttatacggaaaatagttaagcaagaatagttttttatgcaatcgtgtttattctgatgagtgccttagtcaatttgaattaaggacattacttttaaaaaataaaattttgtatctttctcctttctcaattttcaggcttctgctttttctgttttggcttcctagaagaagaaacttgtggcagggaaagcaacattacaacatatcattaaaacaatcagttcacagccaaggctatttcagtcttatctaagctgaaatgagaattctgagtgagatactttaagtggtttccacttcatttctacacatgggtgaggtcgtatcaggccaatttgactgaaatgctaggaaagataatagaagattatctagagaggatagaagatagaaaagattatctagaagataacaggcacttgagggatgcccatgaaccctgggcacttcagtgtgtagatagaaactctcaagctactgatggtctgttggcctttcaaggaacatagaagtggaagctgacacaacagtacttgacctgctcaacacactttatagactcataaattagcaaaaaggaataattttctcttttttggcttacaaatacactttatttatttcaatctttctttattccatgcaactacatgagaaatctttcactccaaattgtaatagcatatgcaagcaatggctgaacttacatttctctcaacttttctaaaattctgtgctctgagtatgttgctgttttaaactctcaattctatgaaccaatcttatcccaatatttcattcttagaatatcaaactattttgaaaccagtcactttggtgggtaattcctccttagaatactgccaaagcctgaggctgtattttattattataaaagccagcatttgtgactctcttaaaaaaaaaaaaaagtataggccaggtgtggtggctcacacctgtaatcccagcactttgggaggccaaggcaggcggatcacctgagatcaggagttcgagaccagcctggccaacatggtgaaaccacgtttctactaaaaatacaaaattagctgggcgtggtagcgcaggtctgtaatcccagctatttgagaggctgaggcaggagaatcgcttgaacctgggaggcggaggttgcagtgagctgagatcatgccattacactccagcctgggcaacaagagcgaaatccatctcaaaaaattaaaaaaaaagtataacgtcctgaaaggaaaggatttgtggtagaggcaatgtcagtactatcaagataagatgactagtctctctctggtgaccatcgtctactcatttggggctatatcaggtccacaactgaaacactttcaataaatactgcaccttattttagagaaggatgtgtattacctgtatgacctatgagtggaaggactgtttgaagaatatccaaattccatagtgtaatgtgatcgctctgtggctggggatggtggagggttcaaaatctaaaagaaaaaaataattaaaatattaaaataacaacatagaaactatcagactttctttcaacttttcttccttcatctctattagtgtttctttacaatacactattagcacaattcttcttttccaaagaattgacctcaaacagtactttgggactatggcttcctcattccctaagacctcatcatggctaaaaagtgcaaagtgacaaaaacgaaaatctgtaacctaaaaatcattggtcagtacatttaggtcctggttatttaaaatagtaagtatttagagaaaaattattgatttaggagaaattccaggtgtgcttcctcttttgggaagtcataaaatgaaggccctaatccctcaataggtaccattcagtagttctacttttacttgaaatgtgaaattaatgcccagtgctttcaagtattctggttactacacagtaacttaaaagatttataagcatggatggtggtgtgtggtaagtcctttgagccttttatgcctaaattttacattcaaaaactacttttacattactatcactgatcacccacatttaaatgagttaaaaaatctaagatcttatgtatgtcgcattcaaaggaaaacagactacttactgcagggaagtaagtgcctttggtgcttgaagaactacttgatgatgctcctgtaacatgggctcggtcataggggggtccactgcttccccccatgatactgagggagctgatcattgatttacctcgagacattcctaaaataaaaggaggttaaaaactgaagatgagtatgatatataaaaatgtatcaagcaatttcattcaacagtaggattacaaatatcaacagtgaagtagtctgattttaaaataacttacactcttttcctataattgaaaacatttaatggagaaaggaaatgaacgttttctagaagtcaatgcttccattgaaagagctggcctagaacaaggccaagaatagctcccaccttctccctcccctggtagaagcagagctatttaaaataagggcttttcaacctcttggaggatttgaaaggattgtaaagggtagaggttgtgaggcagggcatattaaataccagacttgctcaaaagaaaacaaaaaaacatttttagggcacaaacaacatatgaaagaatattttttcatctaatgaatataaatgttgctagaatcaaaactaccagtgctaaagaaaaaattctattttttccaagaagcttcccaaattccactaactgaaaataggtatggcaacaaagcaacactaccattaacagtttaaaaaccatgtttgtctacttaagagttacacccatagtaagttcctattttcagagggtttttgcaaggcaccgccttctccatattcattaaaaggaaggcgtcttttaactaagggcaccagaaaacattaaaaagaaggccagttccctagagcaacacggcctacccaagcttaaaacttctggctactcagctatgcctaaactagccctttgtcccttattagcacatgaagtcaggagaaaacttaagacatattctcccttctatcatccagctatttacaaatctttgttggctgaagggaatcttatataatttttggcctccttttattcatgggctccatagtactagagttccctggtggtgaacttaacctgtggtttacaactctttcactaaatgactggctgattcaccttccgtagcatgcatccagaattgcagtcagagaggcttagagcttgcatatgtatttgctttatatgctttgacaatttctaccaaaccatatctaaggccttctgtgtaaagagaaggtgctaatagtaaaaaagaacgtttgtccttataattgtttaaactcagagtaatatggtttcagacagactctaggtagtattcttttccacaatggaaactggcagtcttgcaggaccaaagacttgattctcaatggatccatcctgactcacctggaagagatcctgacaaagaacttgggtgtggcacataaccaagaggcacagaagctggtccatgaactacatagtcattagtcatagtttccccatctcccttcatacgtggacacaacatcctctggcagataaagtatacagttccagacacaaaaatggtgacaattacgccaataacagaaccaactgtattggtggcctgtggtgctggttcttcagtcggatctacaatgaagaatgcagtatggttatttaatagaaaaacaactgtatattcaaaatagtaatcaaaagagggcttgctaataggatgtgaagctataagcctaatgaagataattcataaacacttttcttttttatgagtacatacataccacgccctgaagacatatgaaataaatgtcatcattaggaatcaaaatgaactacccttaaatgaagacagaaataaaacaataggttggaaagtgtaattgtaaacagatagaaacaaagatggtaaatgaagtacagatttaaacaccattaagaagctttaaataaataaacagataaaatccattctacttcattctatataccatacaaatgaacaacggtattccaagatttcgggaaaaaatttatgaccagaagggataaacctagaaaagtcatcaaatgttttacctggaatggtgaagaagccaaaatcagctctgagcacatgttagattttagatttgaatagtgacatttaggcctgatgaatgaaaactggaagctaaagataagcctcagctctcaaatcccctatgctgctggccttcaggctgtctagttgcctgagaccaaggaacataaggtctttaatacctgattactggaggactcacaaagaaaggccacattgccagaagaggacaccaccccagggattcaccttccctggatccctgagctacccgtttaagaagcagagggcatcaatatcagaggtagagggaaagtgagcttattgaaattagagcattactgtctctattcagagggaaaattcttccattctgaacagttaaattttatctcacagttgcagatcctttaaaaaacttcctcctgcttcatcttacctcaaatctcccatccatatagctaaactcatcctctgacagattatatgaaagaaatgcgtgaaaatgacatctctaagttacataatatgtagggattatcatttacaaatttagtctgtggaatctgaagcatagactcttcttagtccttgagaacaaccgtctcatcttttcattcctttttagtcccctaacattcctttgcaatgccaagcttcaggaaagaaaagtttacattcactaccctcaatccctagcctctgggtcacaccataaactccctgaaatcagacttccaccctcaccactgcactgaaacttttctgtcaacagtcaaagttctactatttgccatattcaatatattcatttcactaacctctttacacaatactgctggctcctgtcttctctttaaaaaaaagtctgatcaatattcttccaagataccactctcttaattttactatttctgattattctttctctgcttcctttgttggcttcattctcttctgcctgcatcttaagtgcaggtgcttcccagagagatttctatctatcacctactattttcctcctcttcttactgtcctgggagattctatctactgtcacagctttcattattatcaataaactaatgagcaccaaatctctcttctgagccacagttccttataatcaacttcctgaagagcttcagtgggatattccatgagtacctctcaggcaacatatcacaaactgaactcactgtcaccatgatcagtcatttctcctagattccaggggtaaagacaccataaataaagtcatctagtataagataataaaaagtgatggggcttgtggcaaagtacacgcctgcctaaaggcatttaatgtaaattaaacatcacatcaatcaaacattacatctgcagccaagatgtggtatggtactttggttttcagttcctgctatatatcccatttaatgactccagtcactcagtgaggtacctgtgggtcaacttaaacttatcaactatagctaagtggttaccaattcctctttattctacttctgaaacaactccgaaatctgttctctccctgccacccccactcctcctcctcatgatttagatctttatcatcttctgcctaaactctaatcgcttcctttttaaattacaggctgcaagtcattcgtaaatggtgagaatgatttagtgggttacaaccagctttgaaaaaataaaacagaaaatgtcagaaagtgttctatataacatgggtaaatatttaagtgttgtgtgacacctttttaaatgcatgagctcacatctctgtattcctcttgatgcgatcagaagtttgaaagcaatcaatctaacagatttccctgcctataagcttatcacctccaacccactggctttacaacttctgtattgcttgaccatgctagtctttttcttgaaattttcagtgactctccactccccattgttaatattgtctaggctctttagaagaaaagcatagtcctccatgattgtacctttacctatgttatctcttgctgacacccctcaacagagcctgtattttggcagtcccattacatggagtttcccagaggtgcctgtttcactcttttctgcttttgaacagtatattccctctgcccaaaatgaaatttctccaattatctacatgatgaacactattcattgatcaacacccagtcttttttttctttttttttgagatggagtctcgccctgtcgcccaggttggagtacaatggcacgatctcggctcactgcaacctccacctcccgggttcaaacgattctcttgcctcagcctcctgagtagctgggattacaggtgcccgccaccacgcccagctaatttttgtatttttagtagagacggggtttcacatgttggccaggctggtctcgaactcctgacctcgtgatctgcccacattggcctcccaaagtgctgggattacaggtgtgagccagcgcactggcacaacacccaatcttaaataccatttttctaagatgccttccttgatcaagtccatctttgtccctaataagctgactactctctcatttctactgccacctgtgtagatttctattacagcacttatactccataatcaatgtatctactatgaaccaggctatgtgttttttaggctaaatgatatatatgttaaatcatttaattttcttataggcatcaggttaagcatcattctcttcattttgaagatgaagacctgtaattccagcactttgtgaggccaaagtgggtggattgcttaagttctgaattgaattcagaccaattgaattcttttctttttttttttttttgagacggagtcttgctctgtcgcctaggctagagtgcaatggtgtgatctcggctcaatgcaacctccgcctcctgggttcaaatgattgtcctgcttcagcctcccagtagctgggattacaggcatgcaccaccacgcctggctaatttttgtatttttagtacagctagggtttcaccatgttggccaggctggtctcgaactcctgacctcaagtgatccgcccaccttggcctcccaaagtgctgggattacaggtgtgagccaccacgcccggctgatttctatgtatctaaatgatttgagaattttgtaactttggttatagtaaaataatatttactcttttctagtgctttactaaatgtttctgtgaagatttctgtgcataagaaaactgctatgtttaaagaattactgaaagcaaaacataaaaaaaccttcacacaaataattagcttaatattaatacttattacttagaaaggaaatctcgataagtaaacctcacacataagaaaaaaaattgtttaaattctctgttaagagtaatttatagatctcagtcctacttacaacaatccagttcatctgacttgtcactgcaatccacattatgatcacacttcttgtgctttccaatgcactgaccattggcacagcggaactgatcaattaaacaaagcactggaaaaaaaacataaatagtttccttatttttaatatcatgtaaagtcaaactctggcaagaatcaaaaggtgccttctgaacacaaatgaaaaacaaattagacttttagctataacttaaatattattctctggagttccattggttgagagagagaaaaaagagtaggagaaaaaaatccagcaggaaatttcctaacattttttttttttttttttttttttttttgagacggagtcttgctctgtcgcccaggctggagtgcagtggcgcgatattggctcactgcaagctctgcttcccaggttcacgccattctcctgcctcagcctcccaagtagctgggactacaggcgtctgccaccaggcccggctaatttttttgtatttttagtagagatggggtttcaccgtgttagccaggatggtctctatctcctgacctcgtgatccgcccgcctcggcctcccaaagtgctgggattacaggcgtgagccaccacgcccggcttattctttacattaaattccctctttcactaaagaattctagagaacttggctgggttgtttttaccatgggaaaagttagtaagggaaagtgaagaatataaaatatgttagagcgtaattaataaatccactaattcagagctcattggaaacagggactatttttatatactgaaggcctaatatattttagtttcatttctcaattttcaaagcttattaatttgtataaatcttatgcatatggagtgaattaaaacaataatatggaacatggcactatgatcagaagtgatacagtcatatgtacttgaaaaaccccaactgacactaagccaagtaatactgaagtttaaacaactgaatgggaaaaaaggattgcatgctgaggcactgaagaattctggataccttcacagttcttctcatctgatttgtcctggcagtttgcatctccattgcatcggagggcaccatcaatacactgcccactggcacactggaactgggactctgagcatacaggacaattgagttcatcactgtggtcttcacattcagtaaacccatcgcaccgccaagccacagggatacagtcaatttcccccgtgaaacaagtaaactgctgaggagaacatgttggaggttcttcaaatgaacaaggagaaggggagtgacaaaaacacaatcatggtcacacagaagtacaaacacatacctgagtgaagctcatttaataattaacatacacaaaatactttataataaatatgatttataactatctcatctattcaaagaagaaataaaggttttcacattacttcctttacattcactataaacttttgcccgcaaaactataaggcaaaagttttttcatatcttgtaatccaaaacaggattgtaatatttgcaatccgttacagtctcacacaaaacctaggaataatcagtataattaccaaagactttaaagttagcctagcactcaaaagttttctagctctaagcttctcaaaggatagtccatgaacccttaggcgttcctgagacctctttcaggggacccactaggtaaaaactatttttataataacattaagatgtcattgcttttttttggctatctttgcactgatgctgcaaaagaaatagtgaataaaacttggtaccttagcagactcaggcaaatgacaacaaactttattagtaatcactgtactatacacagccacatgtgcacagtttaaacaaacacacaaaaagaccaatttcacttaagaatgttattgatgaatcaataaaaaattatattaaaatcaacccaagtgtatgcctctttaatagtctgatcaatcaaatggcaattatgcataaagctcatgttgcaaacctaagtgtggtagtttctaatgggaaagcatttgttttgagttgtaaatccaactcaaaatggaatgtcatttttacttgaaagaatgactgacaggtaaattatacagtagttatttacacttgtctgttagtgaattatctagagaacccataaccttatgatgtgaccataggtcagaaaaccctgtaactttacaacagagaatattgcagattacaggtgaacattttacatggggaattttagggattatttaataagagcctattatgtattcagcactatactatctatattgtatggagaattaaagtagataaaatatatccacgtccttaaagcagtttgaatttggttggggatagaaagaaactaataaacataaaacaaaggacactactttgaactgcatgtcatgcaaaccgtgtgatatagtttggatatttgtccctccaaatctcatgttgaaatgtaatccccaatgttggaagtgaggcctggtgggaagtgtttggatcatggggggtagatccctcatgccttggtgctatcctcctgatagtaaatgaattcttgggagagctggttgtttaaaagtgtgtggcactccctctagcctactctctctctcttgctccctcttttgccatgtgacctgcctgctcactcttcacccccgccatcaaagtttcctgaggcctatccagaagctgaacaatacagccggcagaaccatgagccaattaaactttttctttataagttacccagcctcaggtatttctttatagcaatgcaagaatggcctaatacacagttgtatacatctgtcaaaactcgttttaatacatacattaaaaataattgctaaatgtgcaagcaagaaaaaaggccctttaaaagatattttcaaactggaagatgagatccttgactcagttttatccatgttatcattaacataaagagaaatttttctaggatttgcctcaaagtaacactccagcaccctgatagggaaacacatgctattttttgggggggggggggggggagggtaaagtaaccataaaattgaccaatttaaccactttaaagtgcatagctcaatgacattaagtacattcacattattgtgcaatccctatttttaaaaatttcaagtaccagagcttaactctttgtacatatctgatttccctgactacgctgtatgctatctcaaagatcttcaaatcccctacggtccaagcacagtgcccatagctgctactgaatacatgcattatttattttttaaaaaacttatagttcgacgaataaaatttacttgtaatcccacccacccgatcaacaatttttatatgttgaatacatattctctttcaatatttgtttacagaaatatatattttatgtacttgtcattttggcaacatttttacatcaacttcatgattataacatttaatagctgtataaactcagttattttacttaataattttcacaccattagaaattcatttaaaaatttctgccactgtagataatagtatgatgtagtctttttccttcagttgaattaacttagaattatccccaaaaggaggatatctgaattaagggtatgaatactattgtggtgcctgataccatcatactataatttaacaatggaatgtatctatttgttaaacctgctaagtgattaaaccaattttactacaacagtatcactatactcagtgatatcttttaaaaaatcattttttactagataaagaagcaacaggaatttgctgatggatttgaacaaaagaatattctttccatcagacacattcccaacaatgacacataaacttagagaatctacaatttagtggagagagattacaggaggtagaattaattcatttttttaccttttgggagaggggggaggctactttaatattaggaagcatactcattcacaggctgaaaagtgtggtaatatatacgcagtgaaatactattcagtcaaaaaaagtaggaaatcctgtcatttgcaacaacacagatgaacctggaagtcatcctgttaagtgaaataagctaggcatagaaacacaaatactacatgatctcacacgtggagtgtaaaaaagtcaaagaaacagagtaaaatgatgattatgaggctgggcagggtggcagagaagaataacagaaaagcctagtacaatacaaatgaatggaacacacgcaaccaattaagttagtagacagagcaacttcaatgcctagtcatagaagtctaggcttaagatatggaatatgtttgcatttagggttgcacaagaaaattacaacatatttacctccacatgatagctcatcttgaagtagaaccaggtgcatggggcaagaacaccttgtagtaccatccccctttacaagacaaatatgtgaacagccaccattatcctgagcacaagggtgctgtcctgcaaagagaagaggtgaggatggggagaggagggggagtggagggggagagaagtgggagagaagagaaaaagggacaaccctgtcaaaactatttatgaaaatcaaatgtataatcagcttggactctttttttttacttttattattattattatggactttttttacttttatcattattattattattattattattattattttgagacagagtcttgctctgtagctcaggctggagtacagtggtgtgatcttggctcactgcaaactctgcttcccaggttcaagtgcttctcctgcctcagcctcccgagtagctgggattgcaggtgactgccgccatgcctggccaatttttccgtttttagtaaagatggaattttaccatggtggtcaggttggtccagcttggacttttatttccacacaatatgattcttcactcaatctctacacaacctacaagaaactacttctatctaaccactgtccttatatatttatatataaaatattttaagataatggtaaagctcatcttaatttttgtgaatatgaagaaatgtttactgaaactaaaaaattgctagggagaggccgggtgcggtggctcacgcctgtaatcctagcactttgggaggctgcggcaggtggattgcctgaactcaggagttcaagaccagcctgggcaacacagtgaaatcccgtctctactaaaatacaaaagaaattagctgggtgtggtggcatgcacctgtaatcccagctactcgggaggctgaggcataagaattgcttgaacctgggaggcggaggttacagtgagccaagatagtgccactgcactccagcctgggcggcagagcaagactccatctctacaaaaaacaacaacaaaaaattgctagggagaatgctgaaacttgagtattattctatttaaaatataagaattctcctatattaagatttttaactcagaaaatccgtatatctgaaagacaacttcagtcaaaaagtgtatcttaatgaggaatccattgagaattaaagagttattagaagaaaaaaacttaaaaggcacatgtaacagaacaattcagaaacaaaattatttggtcaactgcaaaaggtaacttgtaatactataaatgtctaacttcctcatacatgggctaagtaaagaaaccactaggcaacttttcaaagtctgtttcacaagttgtatttttaaagaatcattgtttggaattttctgtttagcctgtattaaaagcaacttgacatctgtcgtcacaaaatatgaacatctaatataagccaccatttattatttgactctcttccacaataacattggttctgcttcagtttgtgttgagactgagggagtcagctatctacaaatgagcatactgtccaaaacagacatcacacattatatagaatatacagtctatgtagcagtgtttctcaacctttaattccatgacatttttgataaaaatcccattctctttaatattagaaatttgaaaaaatgatttacctaatatacaatcatatttaaatagttattaaataaaacctctcccttgaaattctgaaaatcttgagattttctgtaataaaatattcatgtatcgactaaataaataacttaggtatgatatcattatcatatttctattaaatgttcagcctgagctacaagtcataccataaaatgacaacaatttttaactttctaattctcaattacttgtaactttacttctaaattcatgaactgtaccaacataatgaacacttgtacagggctactcctgtttcttcattctcctttcatgcttaaattcaatttaaaagcactgagctgagaagttacagaatttcaataattgtctctctcatactcaatttaacattggcatccccggtaccatcatgtatgatcaacagtagtgactgctaggaaggcactttttaaaaaacgttttgcatatataaactcatttattcctctctatgattagggtaattttgatgacagatatgaattaagaactaggccaagatgactagccattttcaaaaaaaaataagaaaatatttctggctacttttcttttttcctggggctcatggagatggctatttttctaagctgggaattgaaatatttatcccaaagggggggaaaaaaaccaagcacctactaattaaacagagtcttctctatgtttacacactaatttttagtttgttttgcctaagaataagattaacccattataactatattcatcattatataatttttactttttttcaagctatggggggaagtatagagagggaagaaaagaaatagatgctttatgttatcagtattcccaaaggaactgaaggagagaaaaacaaggcatgataagcagtcattgttgtaccaggaaatattcttttttaacaggcaagacccatgcctttcccccatttctggtttatgagattatgtttaatttggaaaagctcccgggtaaggttgacataaggctttaaaagcatgaagaggctgggtgtggtggatcacacctgtaatcccagcactttgggaggccaaggtgggcagatcacttcaagtcagaagttcgagatcagcctggacaacatggtgaaaccctgcttctactaaaaattaaaaaaaaaaaaaattagcgaggcatggtggcatgcacctgtaatcccagctactctggaggctgaggcatgagaatcacttgaacccgggaggcagaggctgcagtgagccaagatcgtgacactgcactccagcctgggcgacagagtgagactccgtctccaaaaaaaaaaaagcatggagagttcaaaaaaatggcaaaactaaaagtgcatgaaagtcttcaaggaaacagagtttaaaaatccacaaaagtacatattaatttattataacacatgattcctccaattagctttatcccattaacacttactgtattcttgaaggttcagctcctttactgcatgaatgtcactaagctgggcaattcgagcttggactttggttctaccctctcgacctgtcatgtcaattttttcaatcatttgctgctgtttatcaatccaatagagccagttttcaaacacagtaagtcccacaggctgcaagatattggagtcttctaatactatccggttagcaccttggaaaaggagaaaattcaacagaaatgactcatgtgggtcaagttatacttttggtaattatttactgactaccagttagattctacaggtagagaaaagaaaaaaaaaacaagatctctaccacaaaacttaaaaatcatggtaagacatacactagaaaacagccaataaactagatattaatatgcaatcaagagcaagtaagtgcccaatgtgcagtaaatattctagttcatagaaatgtagaaaagaacttagaacagtagtttgaaaaaccctaacttatatatacaacagataaaaatggcacttctctggaggagcagtggtggtggacccagagttctgagtatacctgaggcatttatgaagaacagcttcactctcaccccacctggcttctcagaacacaattagaaaaaatgactgactcaccccaaggtaagaattatttctaatcatctcagacatagagtcatccagactctgaggaggcaacttctgctattgttgcacagtgagaaagttcttttatacagtgggctaaaatctgtgttcataccccccaccctgctttattcagtttctccctcactcaaaaagaaaaaatatactcattccttctttttcataacagtccttcaaatatttatagaaagttcacggttcctaagtcatgagttcagtcaaacaaagacattagctgatattttggaagtatcaaggaaagtttcaggaaagaggcaagcaaaatgccaactttttaataaatgaagaaaagtggggagatattccagatgggaaggcattgcctgagtcaacattcagatggtaggctaagcacaagtttacttatatattctctcctaaaactctactaatatggtgattgaaaaaattttaggccgggtgcagtggcacacacctgtaatctcagtaatctgggaggctgaggcaggaggatcacgtgagcctaggagttcgacatcagcctgggcaacatggcaaaatgccatctctacaaaaaatataaaaattagccaggcatggtggcatgcgcctgtagtccaggtactcaggaggctgagatgggagaattccttgagccagggaggtcaaggctgtagtgagccaagttcacactgcactgcagcctgggtgacagagtgagaccctgtctcaggaaaaaaaaaagaaagaaagaaaaagaaaataattttgaaggtataaacccataaggacaaagaaggcagaagaacagaagagagcaggaaagtgatataaattttggaagctggagaatagatagaccagggataatgacacagtagcccagagaaagctaaaggcctacagccagtgaagctaacaatgaaattaattagctcagaaagtggaagcaccaggtattttagaatggaacaaaggtaggagttatgtggctggggctgaaagaggagtactaattgaaaatatgtgtaagaaattacacagcaatgttctcagtatttttaagcctcatactaaatacaaacagctaaggatcaccaaatatttaaagaaaacctctatctttaaatttgaagcccaagacaaacacaacaaaggaacttggagaaaaagacacaaaagcagaagaaaacaaataaataccaattaaaaaaaaaacaaaaaacctaaagaataggctgtcttcagaggggcagagcatttggagaacaaaaaagagcccttggaaattaaaaacatgatatccaaaaatttcaaagaaaaatgcaacaagagggttgggagacaaatttgagaagctctcctcagaaagtataacaaaaacacaaagagatggataataggtgagaaaaatacagctacagtcaagaaggttcagcataaaaataaaaagctccaaaataggaaaatgaaaaataaattatcaaagaaacaacacaagaaaacattccagaatttaaggtgtagacttctagacagaaaggatcaacctagtaaccagttcaatgagaaggaagggaaggggaagggaaagcacgagcatagattttaaaaatcttttttttttttttttgagacggagttttgctctttcgcccaggctagagtgcagtggctcaatctcgcctcactgcaaccttcaccttccggtttcacgtgattctcctgcctcagactcctgagtagctgggattactcgcacccgtcaccatgccaggctaatttttgtatttttagtagatatggggtttcaccatggtggccaggctggccttgaactcctgacctcatgatctgcccgcctcagcctccaaaagtgctgggattacaggcgtgagccactgcacctggccaattaaaaaaataaatcttaaaacaaaacattagcatatcaaatccagcaataaataaaaagaatgtaccatgctaaattttatttattccagcaaactgagaaaagaagttaaattccttaatttgacaaaggttatctacagaaaaaccttagcaaagaatacttaatcacaaagtattgaatgcttcccccaagctcaaggggaaaaggactagaaaggaagaagaagggaaagaaggggaaggagaaggggaaaagaagggaatgatgagaaaggggaagaggaaagggctgggggagggagagtggagagaaagaaaaaaggaaagaagggaggaatcaaacaaaggcacagtatcaaattctaggacattgaggggaaagaacatgttaaaagcttctggaggaaaaaggaaaaggacagcatacaaagactgaaatcacagtcacatcaaacttcccaatgacacaagatgctcaaagacaatggagttctattttcgaaattctgagagaaaacagctataaaacatgaaagcaaattatcaaccaagtgtgaggaggaaaaaaaattcaaacaagatcaagaattttaaccttttatgatgagcccctttcaagaagctgctagaaaatggtctctcttaagaaaaccagaagaaatggagtccaggaaatagcaggttcagcatctgtatactcccaggacaatggagaaatgaagttagcctagaaaccaagcaaatccagactgcagcaagatgatgaagaaacccagagatgtgattttaattatgaagacaaatagatggactgcttgatgcatatccatttattgaaacaatatttacattacacaagtattaactctgcagggaggaaaaaagttttagaaagaaatgtacctaacagtaatatgttcatagccataaataataagtaattaagtctagacttaaaaaaattatggcactagtcacaggtgggtcctttctatctgcaaacttgtgcctcgaattctggaaagttcataactatgctggggaggatggaaagaaaattcacacgtgtattttggcgacatatggtttaagatagcaaaatctttatcttccaaaggaagtcaatgtttaacgtctaaaagagaaaaatcaagaaatagcatttttaagcaagtttattttaaaataagtgaaaatagttgtgaatgcttctaagcatgggaactgagagcagcagagtagagcagtaggcttgttttttgttacaagccaggtagaacagtttgatatccataatatttacatgtattactttaatgaaaattaaaattaaacaataaagaagaatgatttttaaagattagctggcggtaatgaaaggatggtctgaggtagacaactgggtaaaaaaggaagtcaatagtgtcactgcaggcccccagatatggtaaggacctgatctactttgatgctggtgaaaaataagtaagctactggaaccaacaaggaaaagatatgcttatttattcaacaaactaagcatgcactggatgcaattcgctataaaaggctatgtgggtggctacaaatacgaaatagaaaaaggtcccaggatgaaagcataattatctgtgaatacgtaagaaaaaaaaaatcaacttgacagtaacctttttcagagaatagaaaaagaacaaacatttctttttatgtggccaacaaagccttgatggcaaaacaccaacaaatacctgacaagaaaagaaaattataaggtaatccttctcatgagcgtagattaaaaaaaatctcaaaacattagcaaatcaaatccagcaataaaaaaaagaataatatatcatgctagattttatttatcccagtaaactggggaaagtaagtaaattccttaatttgacaaaggttatctacagaaaaaccttagcaaagaatacttaatcacaaaagtactgaatgcttctccaagacctagaaaacaacaacaacaaaaaaggattctattatcatcctattcaacactgtactgggggaccccagccagtataaggaaagaaaaaaacacaactctcattatttgaagaaacatgattctataacataaaaaatcctaaagataagtatacttagcatggtcctgtggtacaagctaatatgctagaaggagaaaaaaagaaattgtatttccatattccaggcacaattagaaaataaaacattaagtttagaatagtctttaccactagcgtttaaaagcaccaaataagaaggaataacaactctaatgaaagataggcaagacctctatgctgaaaattataaaacattaagagaaattaaagatctaaataaacagggagatttaccatgatcatggtttagaagattaatattataaagataataattctctctaaactatcaatttaatgcaaacccaatgaacatcttagtatgtgattttttttggaaggggaaactcacaagctgattctacaatgtacatggaaattgcggtagttaacaatagccaaggtaatcctgaaaaaatactgaagacacagatgaatctattgcagttataataattgacagtataatataagtaaaggcaaagtgaccaagggaacatcagagtctagaaacaaacacacacaaatacagtcacctcatttatgaccaaggtgatactacagagtagtagggaaaggacagtctttccagtaaatgatgctgaatccaacagtaatgtggaaaaaaatgcattttaacccctgcctcacactacacaccaaaatcaattccagatggattacagatcccaataagaaaagttaaatgaagaaatttcagggaaaaaactaaagtatctttttgtacctttgcagaagacaaacatttctttcttttttcttattgctatacatttatgtggtacaagtttttttaacatggatatatactatgtatctatgatgtgtacaagtgtgaagtgtgagcttttagtgtaaaaccatagtgtacgttgtacgcattaagtaatttctcatccctcaactcccatgaagatttcttaaacaacataaaagatgttaaccgtaaaaagaaaattaataaactgtactacattaaaattaggacctttcttttcatctaaagatactactgggagaataaaaaaggtaaatcacaaactgggagatttatgcagtatatatcttgacaaaggattcatatctagaatgtacaaagaattcctatacaacaataaactttcaagttaccagttttgggttattttttgagacagggtctcggctttattggccaggctggagtgcagtggtgcaatcatgatcatggctcattgcagcagtgggacaaaattaattgtaatgaatgaaacattttcatgaagagctttatcacagacctgcctgccaggcatggtggctcatgcctgtaatcccagaactttgggaggccaaggcagggggatcacttgagcccaggagtttgagactagcctcagcaacacagcaagacccccatctctacaaaaataaaattagccgggtgtggtggtgtgtgcccatagtcctagctactcaggaagctgaggcaggaggactgtttgagctagggagtttgaggctgcagcaagctataatcacaccactgtactctagcctgggtgacagggcaaaaccctttctcaaacaaaaataaaaacaaaagatagtttaaaatattgacataagtaactaatgtacaaatgagaggtgatatccatggaatactatgcaaccataaaaaaggataagttcatgtcctttgcagagacatggatgaagctggaaaccatcattctcagcaaactatcacaaggacagaaaaccaaacaccacatgttctcactcacaggtgggaattaaacaatgagatcacttggacacagggtggggaacatcacacactggggcctgtcggggggtggggggctaggggagggatagcattaggagaaatacctaatgtaaattactagttaatgggtgcagcaaaccaacagggcacatgtatacctatgtatcaaacctgcacattgtgcacatgtatcctaaaacttataattaaaaaaaaaactgcaattacttttgcaccaacctaatacattcagattgcaacagaaggtgaattttggaaaaaacaattattcaaaagacataaatgcattaggtacccagaaaaaaaaattagaggtgatataagagacagaggagatcagatgagggaaagaatatactataccaggcgtgtaactatacatgcgtaagtgtgtgcctaactgtctggaatcagagaatacataatggaagggaggcatttgaacctgaagacattaaaaaaaatgtgaaaaaaagattaaaataattataaatgtattcaaacatacaaaaatgtacatgatacaggagtaagcagtctcaacattttagtatgctaatgctccagacttgagatatatttgcttatttcttgaggaaaatactgacatgtatgtctgtttcttttcccctctcctctctcccctccctccctccctccctcccccttctctctttccctctctctctttgttgaagaacctgagatctgaagatctgagatctgagatcccacatttcttttttctttttctttttttttttttttttttttgagacagtctcgttctcgttccataacccaggctggagtgcagtggcgccgtcttgactcactgcaaccaccgcctcccatgttcaagcgattctcctgcctcagcctgccgagtagctgagattacaggtgcccaccaccatgcttggctattttctgtatttttagtagagacagcattttgccatgttggccaggctggtctcaaactcctgacctcaggtgatccaccctcttcggcctctcaaagtgctgagattacaagcatgagccaccacacctggcctgagttcccacatttcttaacggtatatatacatacactgtgtatacacagtgtatatactatacggtttcaaattttaaacaaaactagatcttaagaatttttctgaaatttaatttttaaaaatcattcatgttagtgcacacagatctaccttattcttttgaatgactgtaatattccatacactgatagaatgtatttctccatgaaggactatcacaaataatgctcagcaaatacccttatacacttacatcggtctttctctaagacagctatctacaaaggaaatcaccagatcaaagggaatgcatattttaaattttgattattactggcaaattgtcctctaaaaaggctctatcaatttccacttccaccaaagcacatgagggcatgtaattttctaccatactggccaatgctaggcaataatcaacgttaacatatttttgccatgctgacagacacaaatagtatattttaatttcatttacctgatcactagggaggccaacacagactatatggacatcagaaattggggacagaggaggtaattataattacagacataagattgcagagaaatgtgaaagtaaaagtatatcttaagacgaacaaataatttaatttggttaaaataccagaaaggtaaacgccacgatgaggttgtgaaaggtgaatactaacttataccaacttaagagtacaactagacttttttcctacaggttatgaaactaccctgaagattttttaagtaaagcagtgacattaaaaccatgcttcagaaaatttaggagccatgtgtaaactttcatggagaaaaactggcagggagatcaaccagaggctaggatttggccacagatgacaagaacataaactagagcagaagagttaggaaaggatgcattagaaatgtattatttacgccgggcgcggtggcttacgcctgtaatcccagcactttgggaggccgaggcgggtggatcacaaggtcaggagatcgagaccatcctggctaacacggtgaaaccctgtctctactaaaaatagaaaaaattagctgggcgcagtggcaggtgcctgtagtcccagatactcaggaggctgaggcaggagaatggcgtgaacccgggaactgcattccagcctgggcgataaagcaagactccgtctcaaaaaaaaagaaatatattatttacagaaccaagatcaagaaaactggcaggtagttaagtaacagaggagtaatcatgttgacagttgaagaaaaagctcttcaccaaccaacctgatgctgactacatttaatgaataaaactgccaagaaatgtgccaaaaacaatacgatgcaagaaaaacacaatagatgaatcatcttaaaaactcaaattaaaataaggaaacatatttcttgggtacctgagagatcactgctttcaattcgccggagatctgaatcagcccaaaagagcttgcccagcctgctatcaagggctaaagcaattggtttacttaagccactgaaaaagaggacctcccgttctgtcccatccaaagcagcccgttcaattttaggagacctttcctgaagattggtaaaatacatatacctagagggaaaggaggaaaaaaataagttactggagtaagaaaccacataaaatgaggatattcttattaagacaaatggaggtagagtatttttaagtattgtttttaaaagttttaaaatacgtattttttgaccaggcacagtggctcatgcctgtaatctcagcactttgggagactgaggcgggggtattgcttaagcttatgagtgagagaccagcttgggcaacacagcaaaaccccatttctacaaaaaataccccaaaaattagccaggcatggtggcgtgtgcctgtagtcccagctacttggaaggctgaggtgggaggatcacttgagcccaggaggcagaggttgcagtgagctgagattgtgtcactgcactctagcctgggtgatcgagccaaaccttgtatccaaatatatatatatatatcctcttttatataaatatatatgtgtatatatatataaatcctcttttatataaataaatgtgtatagataaaaatccttttataaatatatacatatctatttatatatttacatttttaaaaggtcatgggacacttttactacttttaatagtagcaacaaaggtacacagaagttattagggagctttcatagattaacagaatagtgttagacataggcacacatatgttttcagaataatacgacaaattaaagatcagtgactagagagaccttaacacaaaattttaaattctttctaattaatctatttaataactaaaaagaagttacatataaatcacttcttatatttaacgtctagatttcatccttttcctctcttttgaagtaagctactttacttgctgaataccttatcattgactcagatacaactgattattgagtatttattaaatgcaaagctctttattaaatgaaagaaagcatactagttctcatcataaagaaaactgatgtctagtggtaaatacaagactaaaaaataattaaaagtaacgtaaattggaaaggactaagtataacttagagaggcacagatacagagtactgagtattcaggagggggcaaaaatcacatctggctgggatgaggtagatcgaggaaaacttcctggaggacgtggcagttgaaatggtcctggaggtgtggttaagacttagaattaaagcactagtggcccaggaaagaaagtctgggcagtgaaatcagagaaagtgtaagacaactgttaagataatgcagaaacaaactgatagagaatattgaattgtttgctggagcacaggacacttaaaggtaaataaataacaggctgaaaaagaagggtgaggagagtctcagaagccacagtatctgaacgccactttagtaacataccctttctctgggtttaccacaacggctcgaggtctgtcctgctcgcctttcagcaccactccaactgatctcccatctaatcttgtcacattaatgacattggtagcctcacaagtccagtagatgtagcggctgtaaatatcaatgctgaggtcatagggttgtatttccaggttctgactcggaactgagctcacaaccacagtaaagccctagggaaaaaaagaaatacagagaaaattaaactccaggggcagataaccctgaggcaatcagtcacaatgcttacacctacatgggcacacagctgagaaggctctctcaagtcttaaggagtatttcttactgatacctttttttatgggtaatgtgcttctttgttaatacacatctcaaatgttccttgggttatcctgctgctgaaaaaaagagctgaggtcagattagttgctccaagaacctgataatgccttgattaagagatgggagtgagaaggtggcaactatcttctctaaactggagacaactgtggctaaaaccacaccctagaaatatctctaaagcagcggattgcaactagaggcaatattgccccgccatgggcatttggcaatgtatgaagacattttttactgtcacgactgtgggaatacaactggtaactagcaggcagagaccagggatgctgttaaacatcctacaatattccgagcagccccccacaacaaacaattaatccagcccaaaacgaccacagtgcttgagaaaccctgctctagagataacagcaactagtaaaggctacaaatcaagtcatctccttttctgatcctcaagtctacacatgcaatttttttacaataaagtcaagcaaaaagagaggctttgtccatttgtgccatctgaactgtatcttactggtatctctgaagtaacatattccttaatttctatctattagttatcagcccatcagtcctggcctatatggtggaaagtgtgtctggaatacacagctattactataccctaaatgatctctcagcagccctaaatatattacctccttggtctttattttaagatgagacatagtgaaaaacggtactctaacttccctaaattttaatacattcaagatacaacttacgatcactgctatgaggatgacaacaagtaattatttatagtattataatcccagtctgacagggctcggccacagaaagcaagcaaagaagtatcgatagtgatgtgtaaatccataattggcatgtaaatgggtaagatttattgataatatcctcattcccatcccacagtcaccatataattatgaccaaaaaaacccactggattaataacatgttagatgtttttaaccctactgagattgtgttatatgtttcatatcctctgaaccttttaaataatagttaattagtaatgtaaccgttatttattgagttcctgttacataacacataagagctatgtgctttgcattcttttcagctaaaaaagttcctaagaatcctaagtgagggatagagctggaatcagaaccaaggcctatttcaaggcttctaatactccatacaatagaaatgtaaggaaaaagacttcataaagaaacgtagggggcagtcacaaagccattaccaacacaacagcttaagtacgcctaacaattttcatcataatatcatcatcaaacaattgcttactcaaaatatcgtcagaaggaaaaaataagctaccaggtccagaatttcagtttcatacacacatacacacacacttaagcagagtcaagacttaagtgaaacagagtggttggtgagtccagttattagtcaggagaaatgaattttgaaccaagctctcaattacctggctgccatcttcttgtgcctttcggatcatgttttgtcgtgagtcaatccaatagagttgcttgtccagtgggtcatagtcaatggcccggacattccgaaggctgtggatgggaaggatgatgtcggggctctgttgttcatcaatcaccatgcggttgatggcactcttttgactgaagagcaggaaagtcgtaggagcttaaaaggaagaaaagagaaaatctgaaatctagttaccctacatcctctatcatccaatgatttgatcagcctgttgtatgtatttcatacaaaacagacatagatgttgaagagctaaggctgaggacaaaattctttggcatgccctcaaaaactctcttcagagtaacactaatcagctctctggttaccaaatcagttatgaatttacctaatgacatagccacctaccctgtttttctccatcttgtccacagagataccacagaaaacttcatttccatcaggtatttgatatacaaaattctcctggtctaccaagtgaataacccttaacctattctgtctggtgggtggcaggaagcctgggcttttataaattaaagcagaaacttctagactgattttacacttgacagggcaagacccatctaaggaaaaaaaaaaaaaaaagaaggctgatttttagtctcagccttctcatttgatcttaagtcactgagcctctctaggccaaagtttactcagcggtaaaataaaagtcatagtcatcttgtccctctcactgagttgctacaagaattttacaacgtatatgaaaatactttagaaactgtaaggcactatataaatgtaaatttttaatgtttttaataacttaaaaattatttataaaaaattaatagagatggggtctcgccatgttgcccaagctggtctcgaactcctgggctcaagcaatcctcccaccttggcctcccaaactgctgggaatacaggcagagccactgtgcccacccataaatttaaaataattatttattaccagtagtggcagtaataaacttggtattaacaggcactgaaaccttaatggattgcagatactattttgttgtttatgtgaggacggcatggaaagagagcaggtaaaaattacaaaaataataatagatgctttatgatatggtttggctgtgtccccacccaaatctcaatttgaattgtactcccacaattctcatgtgttgtgggagggacccaggggcgggtaattgaatcatgggggccggtcttccccgtgctgttcccataatagtgaataagtctcatgagatctgaaggggttcccacttttgcttctttctcatttgtctcttgccaccgccaggaaagaagtcccttttgcctcccaccacaattctgaggcctccccagccatgtggaactgtaaattaaacctctttttgttcccagtttccaatatgtctttatcaaccgcatgaaaatgaactaatgcagtggtgcgatctcggctcactgcagcctccacctcccaggttcaagcgattctcctgcctcagcctcccaagtagctgggattacaggtgcccaccaccatgcccagctaatttttttaattttagtagagacagggtttcaccatgctggtcaggctggtctcgaactcctgacctcgtgatccacccacctcagcctcccaaagtgctgggtttgcagatgtgagccaccatgcctggccaagaatgacttctgggagactaccaacaacttcaaagtctaaggccattttttaaatcttcattaaaatatctgtatacatttcataattatactctattttcttagtgcttagacatcacctaaatacaggagaattttgtccttctcaggaatataaaacataaatagccaagccacgactccttgctttatttcctcctattccccattcttcacagctccattatttgtggtctctcagcttattttacatttacactcaaatgaatactggcttaaatcccaaaggaaatcagtactcacaaagaaacttgttatctacaaaactgcaattctgctttaagttcttcattagttaaaaacccacactcagcttggaagatttagaaagttatcccaatgatcctactacaaatctccatttctggagtccatcatactaatacattgatttaacaacttttagcaatttttgtggagtccatacttcgagtagtaaaaacacatcacacagaatagctaaaaagtctcccactatcatttttattttaaaagaattatattttggcagtactactttcttagtaaagcaagaaaaaaatttttaaaggttctaaattggctgggcacagtggttcatgcctgtaatactagccctttgggaggctgaggcagtaggatcacttgaggctgggagttcaagaccagcctgaacaacccagcaagacccccttctgtttaaaagacttagaagaaagatcccagagttttagttcccatattttcttgcctgggaagcaattaatcaaatatatatttggctcctaggatattttgctgggtactctcttttccaagcaaaattttaaccttcaataagattccacaattagttgtggatcttgttgttctagaaatgcagattaagagaaagccatatgtggctccaaataaatacctgctccaaaaagtctactcaaatatattaaaaattacaaattaactggttatttctaaaaggcagctaatattttgacctattttcaagtcagtgtttaaaatgacaaagaatatgccattttaaaagcctaaatccaccctatcaaatttattaaactctaaccacctctctcacatttccttcagaatggtgctttaacaacgacctcatctggttgtcttgagtctcgcattcccacaatggagacatcagagaagctggaggatgagatgtacgtaggagggagcttttcagttctcttctgaaggcatatgtgttcactggtagcttagacaaaggtgttgctcttgtttaagaatagaataaactataaggccaagaccatcatgtatgactgtaccatttgtgctctgtgccaggggcattgagtaggaactgaaatccagtccacacttccttagccacgccatacacctgtagggctaaatctgctcagaggaaacatctttttccaatttgcacaaagatgccacagaggccacttcagtactgaataaaggattacacaatctggcttcccatttcctctctgatctaatttctttattcacttcattccagcaacactagcttcctaggtgttcctctaacatgtcggacatgttcccccaagaccttttgcatttactatccccttttgcttgataggccttctcccagtatccgcatagctcatttcctcacttccttcagttcttgacataaatgtcattttttcagtaagaacttccctaatcaccccagttaacactgcagtccctgtcaccatcaccctttcttgctctttatatttcttcattatacttattgccacctaacccctgacataatttatttagtttattatctgttccactgaatttcattcactgctatgttttccaacggctgaagtaatgcgcagcatgtaataggtgcttgataaataaacactcattacaataatatatgaagaaacaaagaaacaagcaatagagcctagcgcagtggcatgtgctcgtagttccagcaactcggaagattgaggtgggaggactgcttgagcccaggagttcaagtctaacctgggcaacacagtaagacctgatctcttaaaaagagggaaaaaagccagaaagaagcactgagtgacaaggagagccttgtagctatgattttgaaagtaagaaaataaaatttgagacgaggaaaggaaaagaaaaatttatttaggacctccaatatattacatatcatactaaatgttatttaatccacaaaattatctctattttataggcgagtgcgctgaggatctgaaaggttaggccaggcgtagtggctcatgcctgtaatcccagcatcttgggaggccaaggctggtggatcacctgaggtcaggagttcaagaccagcctggccaacatggtgaaatcccgtctccactaaaaacacaaaaattagccaggcaccgtgatgcacgcctgtaaactcagctactcaggaggctaagacaggagaatcacttgaacctgggaggcggatgttgcagtgagccaagatcacgccactttactccagcctgggtgacagtgtgagactctgtctcaaacaaacaaacaaacaaacaaaaagtctttcagccagaactgccatcttccagtaatttgccaaaatgatgaacacaaagggaaagaggagaggcacccgatacgtgttctctaggccttttagaaagcatggagttgttcctttggccacctatatgcaaatctgtaagaaaggtgatattgtagacatcaagggaatgggtactgttcaaaaggaatgccccacaagtgttaccactgcaaaactggaagggtctacaatgttacccagcatgctgttggcattgttgtaaacaaaaaagttaagggcaagattcttgccaacagaattaatatgcatattcagcacgttaagcacgctaagagccgagatagcttcctaaaggaagctatcagaaaatggaaagttatcagaaaaagaaggaaaatgatcagaaaaagaaagaagccaaagagaaaggtacctgggttcaactgaagcgccagcctgctccacccagagaagcatattttgtgagaaccagtgggaaggagcctgagctgctggaacctattccctatgaattcatggcataataggtgttaaaaaaataaaagacttctggactgttaaaaaaaaaaaaaaggttaaataattttcccaaggtcacaaagctgttgggtaaaacagcgtatgtgtttttccaagccttgccttgtttcttcattcatttatttaacaataatttcttgagtatctaccacagactaagtgttattctaaggcacataagatatgtcaatgaagaaaacagaaaaaaaattgttgcttcatggagtttatattccaacagacaataagcaacaaatataataaagaaggaagtgacataaatagtagagtatataaattacataatacataaagaggtgaaagtgctatgggaaaaagaaaagaaaaagtacagataaggggcactggcacgttggatagaatggcagcataattttaattttaaatagcatagaccaggtgtcactatgaaggaaacaattaagcaaagacttggacgtgaagggtatccacgcaaatatatgcaataacactccaagcagagtaaacaagcagttcaacagtcatgaagcgggagtacccggcctagctgaaaccagcaacgaggccagtgtggctgtaatgaagaaagcaagagagacaagagtaaaagctgaggttagagaagaaaactgagtggtggggagtgagagtgaagaaggggttatgaaatgtggggtataggtcatgtaggacccagtaggccattataagaactaggtttttattctgtgtgaaatgagaagccaaacttctcaaaagagatgtctatatatgtcactatcgtttccttttttccattcacgttttaatgtactgcattctgcatttcaccattacttccctgaaattactctcttcagggttaataaccactttacccaaaaatccagtgtatgctattttagacctccccttactcattcaacagagttcatttttgaaacaacctaatctctgtcttcgtgcctctattctctcccgcttttcctcttacctctctggttgctacttctcagtgttctctgtgaacttctcttcctcaaccagagttgcatagtttaccaagtgccttcttttctctccatcagagttagcccactgatgggggttatggcccacaagttaaatctggcctgctgcctgtttctgtaataaagttttactggaattcagccacttccatttttaaaatgtattgcctgaggctgctctcacactgccatggcgagagctgggcagagttcagcaggtgtgagacagcctaaacacccacaaagcctatgagagaaagctgctggctcttgaactataccttctctttaggtaacctcattcattttaaatacatcctggtaatcccaaaatttgtatcttcaacctcatgtctcttctccgatgatagtccatcatctatgacacataatctagaggtcatccttgcttcctccctttctttcccacacagaactcattaacaacttctgcttgctctagcttccacatacatctcgaatccatcaacctctcttcaacacacacgctgctgccaccaccattgtccaggtctacctgcattaccacactggtctaactgacttccctgctactggttctccccagaaatcagaccatgtattatctttaatcttcataacaaccctatacagcaattactattattattccaattttacaaatgagaaaaaataaaggcttaaagaatttattacttgtgtaaagcaaaaaagctaatgtgtggcagagattccaaagtataacctcttaatcattccactacatgcttgtgtcctttctctttcacaactgaagttggcatcagaacagaccaaatttttcctatgggaattctgacacattctctcaagcacaaaagaaagtcatgtcaatagttaattacctctaatatccttagcagtttgttactttccatcatattgacccaaaccctacacccctcccataatctactctttctgatttaatctacttatttcttaatcgtatctaccaatttgttcttgtctatccaccaagaaatgggccttcatatatatttaagttataagccaggtttcccctagccaacaatgttttgttacacactttgttgttagtgttatgtgtgtacttgccggtatttaaaaatcaggagatgagggagtcacacacacaaaaaaatctagattcaggaccaaatgaaaagatctggtaacatcagcttcagttaaactgcaactgcctactatgttcattgcatgttctctttagtttctcatcaactgttactttatactgggttacatgttctcatacgcgttttctgtatggcctgttaaacatttaaattttttatgactgtcctactctttgcacttcaaaggacaagtaagttgtgttttgcgattcactgttttactgtttgtaatgttcttcccttcctttacaataaatatgatgcatgaaactatgcaacttttacacttaatatttaatgtccaagggtaaaagacttaatttttcctttttttttgaagaaagaatctctctgtgtcacccaggctggaatgcagtggtgccaccatagctcactgcagcctcaatctcctggggccaagtgatcatcctacttcaccctcctgagtaggtgggactacaaatgcacaccattactctggctaatttttttattttttgtagaggcaaggtctcgctatattgcctaggctggtcttgaactcctgagctgaagcattcctcccacctcagcttcccaaagtgctgggttacggacataagacaatggaccagcataagacttaatttttctataacatcaaattgctatcatcaaacaagtaataagtaacaaacacttgcattcccctaccctttaaccaaacaaataaccccctctggatttccacactatttaactttagaaaaaacacacactaaagtactttgaaaatgctgctttctctcattctagcttgctttggagggaaatgcagcttaccactacaagtcctgttgtcagcattaagagagtagtgggcagggcatccacaaacaaaacccccaactggcacagccaagcagaggtgggagcagtgcccattgctggaagcacattcattccaccctgactgtcgagatgagtgaaagacgaggatgtccatcacataatccaaatggccctgaatgatggtgcggttttggccactggttttgttggcacgctcaatgctgcgtcggctccagtccgtccagtagatataatcttggtactgagttaagccaaaaggatgaggcaagtcatctgctataacttcacggttgagccctattttcagaaaggcagtagacaggggagaagcagagtgatgaaatatgtgagaatacaagtgtcttgctggcaaaaagaaaaaaaaaagccctaacatataaaacattacattgtaagcaatttaaaatagaaaaattcatttaaaagcaattctaaaacgagaccaattctctgaaatcaatctatcttctgaccccatgcttcaaacttatattcctgctacaaatcactcagtttcctaaaattcttgcaaatggtctactttaaatgtggttttattttctctatataagggtctacagttcactttttcttcttgaactatagaaggaaaagatggaaatatatatattttactggtacaaaagtcatttcaggagtatctagggagttataaatttcattacaagtccaataataatgaaactttcacataataaaaagatgaatccaagtacctggatcactattaataacaaacaggatacaattccagaacagaagaagaatggacacattcatatgaagttgtattaaaagtatctaaccaatgataaatagcagccactgatatttgcatggaaagaatatactgtttgagtaaaaagtagtaaagcttaccaagcatatttgaagattctattaagttggtgtccaggtctgtccaataaagcctccttttagcataatcaatagttaggccgtttgcccgccccacatttggaactaaggtagtacgttcacttccatccattgcagctctgtctatcttaggttttccaccccattcagtccaatacataaatctaaattcaaaataataaatatttaacatttcaattttttattatctgggggaaagagtcatattcatgcaaagtaactaaataaatttaaagaaaacatacagcaaatcaaggaaatgggttaaacaaaatcacggctacaatgctttcaattattttggcaccctaaactaaatatttttttccatatcccaaaaaggaagtgagtcagctttccttagtctttccaatacatttgttccatccaaacctaggaattggaaataaaccaacagtttattgcagtactggcatttgtaaaattaacattcaagaaaacagcaaaggtttaaagctctggtctcagaatctggttcacttctgagtaaaatatttttatatacttttgaatattaactaatttgagtttttaatatgctgaacttactttttgacttgtgtaatcaactcttcctcaaaataagttgcagaagtacatgaaaggtaattataaatactaagcctttaactgaagtcaaaagcaaagcttgaaaatgtatttggtcatatggtccaagggagcatactatatggtaagaacaacgactcaccccttgatgtgtccactgggcaatgaacactacactacgctacaacaatctctgtgaaattttagaataattactttgctgttattttccatttttgagttttgcactttaatcttacagtaatcctacagtataggctttttatagatgaagagcccaaaacactacaagaaatgtgaacaacttatctaatgtcttcaagccagttagatgacagagctagaactagaacctaatccttggccaaatgccctttcaagtaaactagtgaggtgctagtttttgagactcttgaatactggaactaaaaaagcacatcacatgccagctctcacgaaatacctgaggacatatattcactcatcagcctgtcagctgatagctgacttggtagcaatgtatgaacatgcttttctgaaaactgaaggtgtcctgcctttatatgcatttgcacttgtcatttgacaggcatgtgcacaccacaagagccaaagagaaacaactgtgagagaaatttcatacttgccagcagcaaccaattagtcccaactattaaatttatctgtctggcagctaatgtttagagcaaagatcaccacaatatgtcagtgctgactagatgaattactagctaatcatggaatcaatgtcacttcagggaaattattttaagtagcaaatacagtaaacatatttatatgttcacactgtttacttctttttttttttccaagatggagtcttgctctgttgcccagggtggagtgcagtggcacgatctcggctcactgcaacctccacctcccagattcaaacaattttcctgctttagcctccagagtagctgggactacagacacatgccaccatgcctggctaatttttttttatctttagtagttacggggtttcaccatgttggccaggctggtctcgaactcctgaccttgtgatctgcccacgcctcggcctcccaaagttgctgggattacaagcgtgagccaccacgcccggcctgttgacttcttttataagtggaatttttctttagatttcagatttcttagctgccggctttaaaaaatttgctgactcttgtaaaaaggaacactcgcccttgaaaaacatcatgttgtgaacagtttattctatcttgtaataacaaagctactgccagtttataataatgatcaaaccaaactatccattttgaattaataaatactccaaaataaagctttttaaatgtagttttttcttagctcacaacattgtttcggtgggtttacttcaataggcttggaatctagtataactgggaaggagtgcaagcaactacagatggataatacctcttggtatatatacttaacatatcagtatactcatcagtaacatttattaacccattcccctctttcttcacctaaagttaattacgacaagagtaaaattagctaataattattcattcaaatcagcaaaatatcaatagtgtttttaaaagttcatctatcatttagttctcagattcctaatacgtattatttaaaacattaagaatatcatctgtaactatgccatgttccccgaaatgtacactgcagttgcaaagaatgcacatgtaaagctgtttacccttcggcagggtccaacgcgagagctctgggactatctaggtctttccacaccaaaacttgtcggtgctgcccatccaactttgacacctcaattcgattcgttcctgtgtctgcccagtacaagttcttcccaagccagtctactgccatgccttctggataatctaagccgaattctaccacatgttccagtgcactgccattcataaaggctctgctgatggtctgcaaaagaacattaacaactaagtcatatggcataagtctaaaccctatccagaaagaaggtttggtttggtttttgtcaggggcaagaggatccagaagtgccaagaggcatactatttcctattaaaattcacataacttgcaagcacagaaaaatttgatgtcaatctctaataaatgcaacttcaagttttactgccaattcaggggagaaattttaaaactctaatgcaccaaaaatttattctactaacagcagaatgactttacttttaaaatttatcagtaatcaagtggaaaagctgtgaccacaatgctacagatcttaattagtggtcaattttctaaaggtgcttaagattatggcaagtcatcatgcctaccatataaatgaatgtaaccattatactaccattatagcactgagtcccataacacttttaaaaatcataattcaaactaataatagatacatcttatcaagtattatcctaagtacgttttgtccgtagattttgtcacttaatacaacagtcctgcaagtatggcatcacccctattttatgtttttgagacagagtctcactctgtcacccaggctggagtgcagtggcatgatctcggctcactgcaacttctgcctcccaggttcaagtgattctcgtgcctcagtttcccgagtagctgggattacaggtatgcgccaccatgaccagctaatttttgtatttttagtagagacggggttttgtcatgttggccaggctgttctcaaactcgtgacctcaggtgatccatgtgcctcagcctcccaaagtgctgggatttacaggcctgagtcaccgcacccagccaccccccattttcaagatgaggaaatttagaacatcacccaatgcaaaccaaaatttatttatttcatttattcacttaataaatttaactgaacaccattagaatccaactctgactccaacaccccatgttttcgcatattacaaaaaagtttacatgagttatctgaaacaagcccaaaacaatctggaagaagaaaagattattcttcagatttataggttgggagcttcctctctggctatcctggtattcttttcagtaactattctaggaagaagaaaataaagaataactcattgttggccttttccgcctcagtcaggccctaaaattttgtttaaagtaaatcacgaatttttttttaaagtaaatcaacagccattttacgtgaagcacacatttccttactcagctaattgcagaaaatgtcattcatcattttcaaatggaagaaagtagaggaagactatggcttgcagatttaaaacactctggcaaagtatctgtattaaaaagcatctaataaaatactgaatgggcctttcccttcacttaaaaacttaagggttttggctgggcgcggtggctcacgcctgtaatcccagcactttgggaggacgaagcgggcggatcacgaggtcaagagttcgagcggcctggccaacatggtgaaaccccgtcactactaaaaatacaaaaattagctgggcgtcgtggcacgcacctgtagtcctagctgctcgggaggctgaagcaggagaatcgcttgaacctgggaggcaggggttgcagtgagccgagactgcaccactgcactccagcctgggtgacagagcaagacaccgtttaaaaaaaaaaaaaaaaacttgagggtttttgttgaactctgcctgtcaaacaatgagggaggtgggtcacagcatgaagattcagaaattctagaagttctcccttttagtccctagctttaatattccaattcttttgctaaccttgagtgatatatcagtccaataaattcggttgtctgtcacatcaaaatccaaagcagaagcttctttgacaccagtgagtggaatagccacattattattgtttgtttccagagaaattcgtctgatatctgctctccgtgaaaacaaaaggaaagcctctgggacaatgcaggtcttcatgtcactgatgagttcaaagccaatagggcaagcacagcgaaggccctgaggtctatagaggcagagatggctacatcccccgttttcctcagcacaggggttggaacctaaaagattaattataaaaggggcacagaaggacacacacattgatacattcaacatattttcacttttaaattacttaagcgtttggttcacaaatgcctatgattatgtcttgctcccaatctcaagtttcaattctaatatcacaaacaagtaatatgcagattaatagggagtaaaagcatggtgaagtattttcctttaataccacagtaagctttaaagtaaggtatattattcatactatcagactgaattcttttgatgaaggtgtgcctgtgcatgtgtattcagcccttcaattcaaactgggtagctagagtagtaagtcaacgtttaaaaggtcccttctcagtaaaaaaaaaaaaaaaaaaaaaaaaaaaaaaaaaaaaggcgggggggcagtaaagaaggtttcaaaattgcctcaaaacatcaataatttacactgctgactatctccatcttttttcattcctggttcccatttctaagaaagctttggagttactcaccaatcactcgatgaacatttgtagcctttaggcccatgaggtcaggcagctgatctatgatcacttccctctctgcacttcgtttatgaactctttcaatgctacgcctctgccagtcagtccagtaaacatagtcacccaacaaagtaaatccaaatatgtgaggaattttgtcttccactagtactcgtctcccagtgccatcagtattcataaccttcaggtttaaattcaaaagagaaggggatgaattatgcatttattcttcagctaaaaataacaaatccaactgcctgttgtataaaaatccaagagtcatcttggtattcctattacaatgctttctcaaaattacatgatgattttataaaaatgatttcaaattttccatataagcctctatttgaccacttttccccccaatctcatattactcttccttctaaaaattctggcaactttagattatgcaactcttctattaaacaattgtggcaaaattaaaaatacagtatcatcaccttaagtttgcacatttgttttcaaattataatgtaccttcatatacattattttatcatatattttgttttataacatcttttattttatcttgagagctttgcctatggaaactgagattcatgtaaggtcacagagcttgtaaacacagttgatgtctttttcaggactttttccacttagcatgctttttattttgttgttgttgtcagtaacaacaaaaaacagataaaagggatctcaataaatctctcattcctctgagattataatcacaaaagtatcgggattatatgacaccctctctgcatctaagtttcaagaaactaggatgtaccttctctttccaactacctaatagtaacattattaaattcactctggcattcatactgtattcacagtgcattcaccatgcactattcagtgttgacttacttgggatacctttattgacataatataactaatatttgatatttacatataagattatatctgataccttttttgggggggtaggagcagatattgttcacatgtacatgtttttagtatgaaataacatttctaaaggctaatttgcccagcacgcaggcccctttaagtgacagaaatggtctcaggtagggacttgaacactgggactctggaaggcttgctgcatctttcagaacagaacaaggtcttctcagtttctactgcagcatttccaattgcatttccaggaacatgtactgctacctcatctaaaaggtcatatacttaacagtgaacctatgtcctgcattagggagagttcaatcattctattagggagcacccaacacagagtgataaatattctgtattatacaatacaaaaatattactttcttataagtttgtggtatgttaaaatatgcctgattcggttttattcttagatttaattctatcttattttgcattatcttacatttaataaattacgctaattttgctgatctttacattcaaatgttggctttcctattaaaatttgctggtgtaaaagcataaactagatgcccaatattaaacttttaaagaataacacttatatttctacttctattatgagatcaacaaaatcttttctctttcagctatatcactttccaacatttttgtttattttgataaataaatagcttaaacaaaagatggatgattaagtatgaattaggaaaatgaggctgggtatggtggctcatgcctataatcccagcactttggaaggccaaggcaggaggagcacttaagccttgggtttcaagaccagcctggacaaaatggcaaggccctgtctctacaaaaataccaaaaaattagtcaagcatggtgtggtaagcctgtagtcctagctactagggaggctaaagcaggcagattgcttgagcccaggagtttgaggctgcagtgagctataatcaagccactgtactccagcctaagtaactccagcctaggaaaaaaatctttaaaaagacagaaaataggtaagaatgaaattaaaaatcattgtgagaaaaataataaatgccacaattctaagacctttttagtaaacataattctgcatcttctatttaccagtttcccttcattcttctgttctctaaaaaatttctcatgatcagcaaacagtattgtggcagaaagagatttgtatttcaaatataagctttatcactcagtgggtacctttaagcaagtctcacaaataaaatagggacagcagtccaggcgcggtggctcacgcctgtaatcccagcattttgggaggccgagacgggtgggtcacgaggtcaagagatggagacaatcctggccaacatggtgaaaccccgtctctactaaaaatacaaaaaatttgctgggcgtggtggcgcacacctgtagtcccagctactcgggaggctgaggcaggagaatcgcttgaacccaggaggcagaggttgcagtgtgccgagatcgcgccactgcactccaacctggcaacaaagtgagactctgtctcaaaaaaaaaaaaagggacagcgccactgccatcactgaattagttaaggatcaaataaaataatgctaaatatatagcacagtattaggtgcactatctggtaaacactggttcctgtcctttaaaaatcattttattaaaatgctttagttcctaaatgtaaacagctaaatgattgtatttaattatttaatgtagtgcttcaaaataaaaatacataaatataaaagaatatatgaaaataaaagaccaaaacaaccactcactgttaaactgaagacaaaaaccaagagacctttatgtatcctgaaaccagtgggaaactacacagctacagcctcccatttcctactcccatttttattgtttacttttgctagttagatataaagtaactaaaacagtaaacaaaaaagaacaaatatttgacaatttcatatgagtacacttttgctgctctgccagacccctaactcacctccccgcaaatcaaacaacattagtaaagacatctagtaaatgcaaaccaccatgatagacctgatgaatgctgagaagtttagaacagggcctcttccagctaatgtattacaatctaattggggaggtaaacgatatttacattaaaattacacacatatcccctctctgtaagtaatcaggaaaaacttcaggaaataatagcagttgaaattcatcttgaagaattagaattttgacaaagaaaaagagaaacagattttctagaaaaaaagaaatgagttaagacacagcaaagccaaggatgcacacgacatgtttgactttgaaagaaatgccttgactgagatagaacgaacacatgggggactcaaaggatacagcatcaagcagataccaccctatggcaggtattaaattccaggataaggagaattacagaaagcaagaaggttctgaaagcactttaagcagggtgacacaataaacccatgtttcagaaacacttcatttatctctgtcaccctgttcagcttgtgttaaagataaatatcttattttaaatgtagaattatgaaaaaaataaataaaccaatatagaattatggttagcaaaatattttcaatttctgtgagatggcaagagaggtccaaaatcccttatctaaagtcagggtcagttgtattcctgaattcagactgtttttgtctttttgtttttttttaaagaaaggttaacacaatgcacatagcatatcacctctacttgggttcagggcagcactatttatagccaaacatgttaatatttctgcaataaaacacggccaggcgcagtggttcacacctgtaatcccagcactttgggaggccaaggcaggaggaccatttgaggtcaggagttcgagactagcctgacaaacatggtgaaaccctgtctctactaaaaatagaaaaattagccgggagtggtggctaacgcctgtaatcccagctacttgggagggtgaggcaggaaagttgcttaaacccgggaggcagaggttgcagtgagccaagatcgcaccattgcactccagcctgggcaacaagagcaaactctgcctcaaaatgataataataataataataataataaataaaagtatgcccgcagtgtgggacagactacaaatagtctcacactggttcagatcaagttttccaccaaatcaattaacaaaagcagcatttggttttcagagccctttggatttcagaattgcagataaaggattatagatcagaaatactttgctcatcttcacttcagtcccttgagaaaactggggtttggatcagtgttaatactgctctagatacaagcaagggtctcaggaagaagagagcaaagcaaacaatgaaaagaaaaaggtcttcagcaacatttgctgaaaggacaacaaatgaagaccacgatcaaagtattaacaagctcaacaaaggtattaacaatgaaggtattaagaatggcacagtggcgaagaactcaaaatagttcctgagaaggcacaactaatgatttggttgctttactcacttgagcactagtcccttccaaccattccttgttctctcactcgaaaagcaaaaactaaaaggtctttttttggtaatgacgtaaatacaaaagcaagatctatcaattcatgtctatttcaagttaagcaatgtaattaagatttattaaagatttttttaaaaccacgttttgtaagcacactgtttcctttaattcctgatctccttgttctcatctggtgtagtttttacaataggtttggatctaaaacagcactgtccaggagaaatataacacaagccaccaatgtaggccgtatgtgtccatttaaaattttctagtagtcatattaaaaagtacaaaacatgccaggagaatgttttcgctcacacctgtaatcctagcactttgggagtccaaggcgggtggatcacttgaggccaggagttcaagaccagcctggccaacatggtgaagccccctctctactgaaaatacaaaaatgagccaggtgtggagatgcacacctgtaatcccagctagtcggtaggctgaggcagaattgcttgaacctgagaggcagaggttgcagtgagctgacaccgcaccactgcacttcagtctgggtgaaagaatgagactcatctcaaaaacagtataaaacagtagacagaattttaatagtatactttatttaatctaacacatccaaaattcttttctctcaacctgtaatcaatattaaaattttattaatgacatttatggttttttttttaatactaggtctcttagaatgtgttttacaattaaagtacatcctaattcaacctaggcacattttaagttctgcagagccacatgtaattagtggctacatattgcactgtgctggattagagtcttcagagtggtgactacatacagcctataataaaattaattggttccttttttagtttacatcactgtcccctctatacctgtcaccttcaggcttacctcagatcgatcaggctcactaaagcttcaaacaaatgtcttttatttggtctttctttcttccaagctatatactatttaattctaatatgaagttaaaattacttcacacacacacacacacacacacacacacacacacacacacgtcttagatgaaaaaaactactttttttcttcttgtcacatttgcaagtttacatataaaacactagctaagaggttagttagaaggagcaacaaagacctgattctttcatttattttaggctatgtcaaaaaggaagtattaagaccatagatatattattagaaaacccatttctgccatctccttagccctcctgcttaagacacgctgcagtctagatcagccatgtactaacaatggttaaaactaggtagttcatggtcgtctctactctgctttctatactctgacattttccataatttttaaaaaatgaagagaaaaagctaagaagcaagtccaaggacacacaaataataatgatgatgataactgctgttattaataaatgctattattggccgagcgcggtggctcacgcctgtaatcccagcactttgggaggccaaggagggcggatcaccaggtcaggagatcaagaccatcctggctaacatggtgaaactccatctctactaaaaacacacacacaaaaaactagccaggcgtggtggcgggtgcccgtagtcccagctactcaggaggttgaggcaggaggatggcgtgaacccgggaggtggagcttgcagtgcaccgagactgtgccactgcactccagcctgggcgacagagtgaaactcagtctcaaaaaaaaataaaataaataaataaataaataaataaataaataaataaacgctattatcatttttgttagtatggtatagaaaggaattataaggatcctccgaagagattaagggatcaccagcttaaacaatatctgactgtgagactttgcatctaaacacacagataatgtattttccttcacacaaagtccaatttctgaaatgtttccttccattacttttgtagaggtgacactattagaaaactgacttctccactaagtatttctcttgtaccagccacacaatctttttctaccgggcacaagttaaccatagtgaaataagaacatgttgctctgtcttaaagaaatcactattccatttctcatattcctgtaaaagttttggacaggttactaggtctataaatacagtttaagctccttatgtttaaaataacacaaatcctggcaaaagcttgtttgtatattctgaacccagaacaaatgaaccactttaggcaattccaaaagattacacttatgctttaaaaactgtgccaatgttaattaaatctgacaactcttaagggtgtacttcactgtattacctcagagtggtttaattagttaaactgaaattaggcttctgtcacttctaaaatctaactccaaatctgaaccagagtctccagtggtttcagctgctttgaccacactgtggcacattggtttaacattctgaaatattctaaaccacactgagaatataggctacaagaggaaatagacgtgggttaaccataacattatctgcacaaagaagaagtaatggcaaatcttctacagacatcacatccagtttttgagtcatttcatcagctcattaaatgtcaagacaggactgcccatgcaatcttggaatgcagccagtctactaccaaaattgctgctatgcaacttcacttgacaagacaagttcaaggaacagatgcaggaggacaaccaagcaaccaccataaaatgtgctagagttggaatgctataaagttctagaagagaaactcaaattatgcccaaaatgaaccactcctcttctaatgttccagacaatatccaaaacaagcagtgaattaaaagcttatacataaggaagacagatatgactgagggttggggagcatattttttctgatacaacttcatagaacataaaatataatttcacacaaatgggattttaaaacacagaatatttatccacggaaataacatttcaatcatgccaaatctcactgagatgacaagtataaagaaatgctttggacccagtaggtgaagtaaagggacaccacacacctgtttgagagagaggtaggggcaattacagtgctatattcaaagccttttaacctacttcaagatacattaagtctgagtacatataagtgattttaaatatgaaaagaattgaagtatcatagttactctgggtagttttataatattttttgcaaggaatcaggcattgaatattaaagatttgcaattactatgctctttttctgttagagctaaaaattgctactgtgaccaaagctttctaaaacctgaattactccaggaaacgaaaaaattgagaacagagttccagatgaaggcatcatgatgacgaatgtcaacatcctggtcaattatactcaactgcttcataagacacttctgaaagcctcactgtcctgaggccccaaaaacctaatagggaaaagattaacatgtcaacaagggaaaactgccctctctgctctcattctttttaagcacagctaaaataaattcttttgtttttggggggacagggtcttgctctgttgcccaagctagagttcagtggcatgatctcagctcgctgcaacctctgcctcccagactcaggtgatcctcccacctcagcctccagggtagctgggactacagttgcacaccacaatgcctagctaatttttgcattttttatagagatggggttttgccatgttgcccaggcttgtctcaaactcctgggctcaagtgatcttcccacttcagcctcccaagtagctgggactccaggagtgcactaccacgcccagctaatttttattttctgtagagccggggatctcactatattacccaggctggtttcaaactcctagcctcaagggatccagggatcctcccacctcaacccttccaaagtgataggattacaagtgtgagccactgtgcccaataatcaactagcaattttcaaataggaattcacaaatttcattgttatgcgatgtaccccagacacaaaataacacaacaggccagcaccaggtttacaactcaatgaacattaagtccaaactccaggtgctctgctgagttgaggaatctaatgatggagtttatcaatatcattcttctctgatcatatgttatgaagatttggggagaaatatatatccatactaacatacagtacatgttgtgtggtaaagtagcacaaatgggcaaatatttaggtatttaaattagttattttgaatatttctcaaactgaagtataatcaatctttcttttttttttttaagcagagtcttgctctgttgtccatgctggagtgcagtggcctgatctcggctcactgcaacctccgccacccgggttcaagcaattttcctgcctcagcctcctaaatagctgggattacaggcgcatgccaccacgtttggctaatttttgtatttttagtagagacggggtttcaccatgttggccaggctggtctcgaactcctggcctccagtgatcagcacacctcagactctcaaagtgctggattacaggcgtgagccaccgtgcccagcctcaaactgaaggtataatcaattttaagaaacacaatgttacaaattggcaaagattcaaaaggaagtacttgttgatacttgtcatattatcagaacagccttatctcaacaatagatttattataatttcttaatgaggaattaatcttacaaaccaacagtaaaaaaaattatcaacaggttcctatatgtttttaacagtacaaaggctaagataccagacaaagaaactcctttaaaaaagaagtttgaatacttgggaaacaaatttccttattagggtattgatgaaataaaggaagttatcataggaaaatgtagccctgcaatttcaggcttagaatatgaaacagaacattcagcaaatgccaagttttcagtacacatcatacaaaataataccttctttattcaaaagttcttggtactaaaggttctaataaaccttgtttctgtttcccaacaaaggtgtgccaggtaaaattagatttgtacaaaactagctatggacattgtatcctcttaaagtagggaagcttactctaagatttaaagcaaatacacatgttcttacagtagacatgaaaatctctctttttatctatactatcaggtgttgctgcattgtcagtagaaactcagaaatgaaagtgggcaggagaaaccaaaataaaaagtatataatgaaaaaacaggtcgggcatggtggctcaaacctataatcccaacactttggcaggccgaggtgggtggatcatttgaggtcaggagttcgaggccagcctggccaacatggagaaatcccatctctactaaaaatacaaaacttagctaggcgtggtggcatgcgcctgtaatcccagctactcgggaggctggggcaggggtatcacttgagcttgggaggcagaggttgctgtgagccgagatcacgccactgcactccagcctgggcgacagagtgagaccctgtctcaaaaaataaaaataaaaaaggccgggcacagtagctcatgcctgtaatcccagggctttgggaagctgaggcacgcagctccaggtcaggagatcgagaccagcctggctaacacagtgaaaccccgtctctactaaaaatacaaaaaattagccaagcgtggtagcagacgcctgtagtcccagctactcaggaggctgaggcaggaaaattgcgtgaacccaggaggtggagcttgcatgcagtgagccgagatcgcgccactgcactccagcctggacgacagagcgagactccgtctcaaataaaaaataaaataaaataaaataaaataaaataaaataaataaataaatagaaaaagaaaaaagaaactgtgagagaaatttagcattgacaatactattgttttcaataaaaccaactattagaaacacactgattttgtcaatcagttaaatgggtatataacaagaaaagcaacctcaagaaaatttaagctaatagtacattcttaattttacaccatggcaaaaatgctttaaacctataaattatcaacgatatatcttggctattagtaagaagtactacaggccctcagtgcaacaaacgttttcagcagtaaaacctgatcctaaaaaaaaaaaaaggaatgctgttaagaaacaaggttgttctgcctactgcagggtcatataaaatagaaataaaggcttttgatctttcctctatcaaaaacatgaaaattattctttctgctaatgctttagtacttattatgggaaggccccacaacaatatagtaaaaatcaggagggggggtggtggcagaagtactgtgcagacaagtaaactaggtttgtccacaaaaggcaatgaagtcatttcagcataatgaagaagagacataaacaagtactagcaggcaccttttaaattttaacacctacagataggtggccactatcacctgacaagtagggaaaacagacataccctcacatatatgttattctattaaagcaggagccaaataccacaaccatcttttaaaaaatgtgacatcattagcaatgccctacgctcaatccctccttcccgaagcttattataaacctgaggttaaatctattcattctttctacaactctgtacaatataaaaacacatctaatacccagaattccccattccttctccctggtttccctaatgtagccagcatctggtcacatcaccacttacaaaagaggaagtgagaagctgatctaaagaatttccactaagcgagcaggtagcataaatgaatgaacacagtgagactttcccatgtgatccactcaagacacataggtttactatgtcttaccttgctatataaataatttaccaaataattatcttttctttccaaatgtactataaacacatatacaacagtgtgagcccaaacttttttttttttttttttttttagacagagtcttgttcttgtcccccaggctggaatgcaatggcatcatctcggctcactgcaacgtctgcctgccgggttcaagtgattctcctgcctcagcctcccgagtagctaggattacaggtgcccgccaccacgcccagctaatttttgtatttttactacagacagggtttcaccatgttggccaggctggtctcgaactcctgacctcatgatccacccacctcggcctcccaaagtactgggattacaggtgtgagccaccgcgcccggccaaccaaacagactcttaagtctttcagaagagaacagggttatcacaaccataatctgatactctgttatagtcccagcgaaaagcagctttcattctcgggcatgacaaaagctagggagctttctaaggaaaatgggactagaagggagaatgtcacccagactggggttagatcagtatctggaatcagttgccactaacaaaaggctagcaaatacacttcttggaaaaagagggatttttaaaattatacatctttgtaaaagttttcaagttcacagtattatcaaatcaagggagatgaaaagctggtagtagcagttgctcctagaatcactactagtctcaggatggaaaaccccagattttctccccgagttatgcaggactaatttagacgaagagctgcactctttctttagtttgccaagtatcagattttacatcaacataagaagagaataaataactatatgctgtatttcctagacgtgcctatgtaaataaaatgacaaaggctctgatgtcctaatagtgaattaggacatcagaatctccaggggaaattataaagggaggtcttcatgtatacagaagtaaatttaccacaaacatcaatctataaaaaggggacaaaaaacaaacagcagttgtgttccagcaaacctagaaggagaaagatggatctaaaaataagatttatgggtgacagagcctttgcagattaaaagaacgaatgaatgaaggaacaaatgaacgaatgaacgaatgaatgaaaaaaattaaaaacaggtttaaggatgctggtaccatacagggaagaaggaaagaaggggtgacggagccaatgacaccactgtatgtatgtgtctgtatgtatatatatatatatgcatagctcaagaaaacataacaaagaggccagaaaaggaattctaattttaaaatctactgcactcactgcaaactaggaaaataaatcctatttaatcaatgttatatattgttatataaagtgtattaatttttattcttaaagatggtcactcagaacctccataaattgtaatgtctttatctgaatcccttctgaactatttgttattctgaataaatttctgtatctaaagtattatacctaaagtgaggaaaataagacttgaaatattcccagtaagaaacaaatgattttattttcaggctaatcagtcagttatagcagactaagatgggcaaaaccaaatacggaattttaaaaaccctacatgataataaatttggtgcattcccttacgtaaattttcttgctacagatattcttctaaaacttatgggctttaaactgttttcctaagcatactcgtacctatacactcatgtatagttcataatccacaggtgtgaactagatgggattaggtaggcaatctatattcaagctgaccaaaatgaagctaaaagcctgtctgaaacataaactcataacctttgtctcatcagcaatgcactccaactgttaaaagattcaaacatcaacttggatttgaaaagagtgggaggcagtgaaatactaacagggagaaaatttatggagtctatgcaaaattttctattaatgaaaaccagctgcaagaacaacagatgccgttttcagtatttgagcctggtggaatactaacggggtttcttctattccaagtttccattttggaagcaaggccttgaagtcattattccctcagggtcatgggcactctacagaatacctttccaaaacaactgttctagagtctgaattttctgtccattagatgtgtacagtgtctctctgaagagccatttaaagccatccttgtatgtgaagtttcccccaaaggaaaattgagacctaactctgttctatctatgtgatccataagacctgtagcaaagtctaattcaaagttgttaattttagacttaacaccaatatcagggatataggccactaataaaacactgtgataaaatattaatcactgattattttcaccataatctatttgattgccacaaacttaactctaccacttggtaaatattttttcccaagctttggttaattagtcttgttcccacacagcccataaatcaattttaaaattgtttgcatgtaaccatcataatatttaatatattctaccatctgccccaacaccagttaacagcaataaaagatatagatatagatatagatatagatatagatatagatatagatatagatatagatatacacatacatgtgggctttgttttcctaacttaggacagccagttcttccagtatagatcttacataattttggtttgcagaaattgcccctaggaaattcagaaagtggctttacccaaaatgaggaaaatcacttacataagcttttaagactagaaactgatcagcagccatttctcataccaatacatctctccatcctaggattatgtggaagagaatatattatccctagaatcatgaaggttgagtaaaatttctgtaaaaggtacctttggcaccccagacaactgttaagaaaaaagaatatctgtactcaaatcattatactgtcgactcaaaacccattataaaagtggcttgaaaatgaaaaagcaaaaaacaaacctcaatcttgtctgttttggcatctccccagtatattttgccttcatcataatccaaggctaaaccatttggccaaccaagagaagtgttaaccaatactacacggtcagaaccatccagagctgctcgctcaattttcggaatttctccccagtcagtccaatacatgtacctagagaagtatacaaaaaatgagctaaaaatagataataaaatgtaactttcagatattctaaaggtgagatccatccctcctattacactggtatcatcagttaatgccaaggaaggggaaaaaaaaaaaaacatatgaagaggtgtttaagacatttatcccagcaatatataagattgtgggaaattttcagatcagtgtgttctagagccaatcctgaaaatgcctcccaataatgagattacagttttacttcttttttttttttttttttttaaatattttgtgtgcccttttccatgaactttctctctcttttccttgatggcttgtcatctctctgacacaaaaggcttatcccagcagtattagtcagatggcaaactgaattctcaaaataactatttcttcctgcagtgctaagtgattcttacggctcctggatgtttagatggctctaaggcattggtatatactgaggtgtaatttgtcactatgcttgtcctcagaataaatctcaaagtaacaaaattgttgagtatgtaaaaagttgtacttccctggactatgatcagggtggcatggcaaaacaaaacaaacaacaacaacaaactagaagtaaagctgcatgggctggcaaagttttggaaatcaagtcattcatgtatttagggaaaaaaaagtaagctatattcttactataaagtactgaaaatggaattaaagcttctaggggaagggaaagagttctgaaaacaatttcttcccacatttttcatggtaatgatgcaatccgagcaaaatctgcagacaacacccaaagtcagcaaacatggacttaatttagaaagaaaaaatatctaagacatccaaggcaaaaaactagcaatttttaaacttgagattgtattctaatcaccatatcctaaaatagacagccattaaagagctgtttactggaaaccaatatatatgtcatgttatcttagtcaatgttttcaggaacctgtgaaaaacagaaacaccacacagaatttactatcagtagagcttcttacccaaccatgggatctaacacaatagcccggggttcctctaagtcctctgaaatcaagatcttcctcatggtcccattgagccttgtcacttctattcgatcagtgccagtgtctgtccaataaagatttcgtgcaacccagtccacagcaataccatcaggatgggcaatttgagcagtgaccacaaactgactgccagatccatctataaatgaacggcgtatggccctcacttcatcatcagtccagtagatgtagccttccacaggatcgtaatctatggcaatggcatgacggatgtcttctaactgcagaacaatgtctgtaaaatctggtgtatccaaagaaatgcgtctcaagtctgtccttcgagctaaaagcaataattctgtggcacctagaacaacaaagtgaaatgaagaatactttgaaacccagaggtaaaatttacctgctctagataaagaatcaagaactgaaaaataaatataaaatatacataaattaacacaaaaggatgtgcactctctttagagtggaaatggaaagtaatacagtgaaatagaagagtctactctgaggtcaagctgtttaatggctaactctccaaattaagttgtgatacattctatggtttcattggaattaatccagctatttaaaagtacaatgaataatgactatgtaatgactaagaagctaagtagctcagtattaaaggagaaggaaatgtaggatatagatcctttgttcaagaagcattttttaaaaaaagataaagaaatttaggacaagaatctttgtgcttgataggaatgttctaaaattggattgtggtgataactgcgtaactctgtaaatttactaaaaagtcaccgaattgtacaatttaaaaaatggatggattttatatgctatgtaagttacatctcagtaaaactgtcttaacaaagagaaatacagggcaatacctcacagaattgaggacaaagcaagctatggagaaacaaacagctgcaatggagggaaggaaccagataaacataacacagtggttaagagttgtggatccaatataatttgattcaagaagctacacaaactttgggaaaatatctaatctcgctaagcctagtttccccatctataccttgtaaggttgttgtaaggattaaaggagataaatctaaaactcaggaaagtactgaacatttaagtactcaagaaatattaactaatacttaacaacagtattaaaaaataaagattttcagatttttatttcactgaattttaaattaggtttatttatgaactgtttaaagcccaagccccaaatacttaaccacataaccaagaatgaagatactgagctcaatctttttttcattttaaattgttcaagtaaaccaccagcaaaaaatcgtctaactataggaagctaataaaagacagtaagcaaattgacaactgaaagaataagaaaagattcccagctaaataaatgagtccaaaacaaaatactggcatataaacttcaagaatcaatctgcaattacaagtcaaaaaactgagaagaggagtgaagcctctcaatatcagccctttcactctagagctaattataaatgaattccaacttgaagaaaatacagcccaaatgccactgcaggaaccaagtaggaataactttgtacaattcactgccccggctaacaaccaaaaggagccagcctagaacttcacaaagaagtcatagagctgttaatttgagcaaggtgatcaaaacagaacagttaacttaaggctactacatgccaaatgcacacatgaaattcaaaactggttaaatatgtacacttgcactgctgtgagggagcagatagaccattattgctaaaataaatcctctgttttaaagtcaggctacatttttaaagaaaaaagcaacattacaaaaaccttttgttttaaattgaaaccaaattgctgtctgccatggaaaccatttgaccaagagtcagccagcttcaccttttactatgaggataatttatcaatgccaagtcataacaaacatcctgtacacagactcaattccatctctctgactccctggcccccttgccagggactctaacacactccaaaacacaggcttctgcttttcagagttagataaagaagccacagctaaatacaacaattttcttaccaggtcttgctggttgctagagaaccagatggtgatccataggggtgagaatgaagaataacattctcattaagaagaaaaacagaagaactggtgttcttccaaactggaagtcccttaaaatgtcctaaatcagtatactttctccaacgtgccctctctctatagggaattaagagtaaggagaacaggcaaagtgtgtttcttaagtataaaaagaagttgttttaaatatggattttttttcccagctctgaaagcatctctctgttgttaaaaagcaatttaaaacatccttaaataatttgttataaaatatatctcatgatattctttgtagctaaaagtttaataaacatactttctttcacagaggttctttattcacaaatgctacctgttaaaaatatattccttatgcgactactcatttccatagttatcaactgtgatatcaatgactatgagatttgacagaaaagatacaacacgtaacttttttcaaaaatatgttatttaaaacactaaaataatttataaaatagcattcaagtgatgccacagaacaaaacactcctattctataaccatgtgtgaagactgtgaaattaagtgactggtctcccaaagcagtataacctagagagctgattatagagaaaacaaatcatgaagaattccaatagttataaaatttttcattttggataatatcttcttaccatctttgcaggtttttccattctccaggagtttgaccccagtggggcaagcacactgataaaaaggcttgactggagacatcaaacacaaatgggaacaacccccattgtcaattccacatggatttgtggctgtcaaatataaatcacattgattaatatcaatgattactaagtacacaaaggttaacaaccataacatgaacaactgtgataagccaaaattattaccaaatgtcatgcaggtgcttgactatcaaaccatctgcaaagacaggaattaatcagtgtgaatttacttagtattttgtaaccaaagaggaatacacaagaagtaaagcaggagatccctgccctaaaagaggttacaatttagtcagttaaacaaaattaacaaaaagcaaaactaaaaacaaacaaacaaacaaacaaaaccaataaaactaagtgctattttgcacattatagacaataagtacagagtcaaatgggaaaaaaaccgctgaggtttaaagaattgaagaagagctttgtggagtatacagcacgggagccttcaaggataggaaggatagataagaggacatttcaagtatggtaaagctatctgaataaaactttgggggctataaactgggtaagatattaaggtgaacagtataactggaggttaaggtttctactgactaataggaactaaagctgaatgaatacaaagaatgggaatagattaaagtgaaggacactgaaagccaagaaaagtaattatgttgaaaagtcatgccttgggaagattaacatagaagggataagcagaaaaaaggggaaaatgaaaatcagagaaaactaattagcaaactttggaaattatggaaagggatatgtccaaacaatactcatagaaaaaaatcaacataagatggagaccaatggaacatgaaagataaaagtaaccaacatgaaagataactgcaaattctcaaattagtaaaacataaaggaccaacaatgccatttaaaaagaaaaacaagaggccaggcacggtggctcgtgactataatcccagcactttgggaggcctaggtgcgtggatcacttgagcccaggagtttgagaccagcctgggtcaccaacatggtgagaccctacctctataaaaaatactaaaattagccaggtgtggtggcatatgcctgtagtcccagctactagggaggctgaggtggaaagatcacttgagcctggaagttcgaggctgcagggagccgtgatcacataaacgcacaacagagcaagactctatctcaaaaaacaaacaaaaaacagggaaaattctcttttgagggctatgaagaataaaaaaattcatacaagtgactgaacattttcttttgtacagaagagtaacacatacacttaaaaacatttttatgggctcatgatcatcagattccaacataacactttcaatatttgattatctccccctaaatggagagctaatataaagcaacatatgttgcaaaatctcttcatttttggctatgtaataaaatctgaaatacactcagacagatgccagacatttatttacacaaaagtgccaaacccttaacattctcgtattccttttaaacctaattccagtcctctcttacaagttctcagcagtcatagcccgagtcattgtaaaggctgaccaaacacagaaccaaaactaaggaaaacaaggtgggaggggtacacagaaaagtttaagtaggtattttatttagcaagctgaggtacttaaattcaaatatattctagattaacagagttttcatttaaaaagaagaggcgtttttgtgtgtgtgtgtgttttttgttttttttttttttgagacataatttctttcttgttgcccaggctgaaagtgcaatggcgtgatcttggctcactgcaacctctgcctcccgggttcaagcgattctccagcctcagcctcccaagtagctgggattataagcacacgccaccacgcctggctaatatttttgttattttagtagagacggggtttcaccatgttggccaggctggtctcaaactcctgacctcaagtgatccacctgccttggcctcccaaagtgtgggattacaggcatgagccaccgcgcctggcccaagagtttgttttttaaacacactcacatcaacacattcaactacatactgaaagaaataatatgaacaaaaaaactcatttgtgtataagcctagcatataagctatctcaatttttaaattatctctctcttctccacctctaaaagcgctgactcaaaaaggctgaggtggtctgtagtgacaggctacaaaatggtctaggctattgcctaacctgaattatacttttacattttcccttttttttgagcaaagtctcgctctgttgcccaggctggagtgcagtggcacaatctcggctcactgcaatctccaccttccgggttcaagtgacactcctgcctcagcctcccaagcggctgggactacaggtgcacactaccacaccccattaatttttgtattttttagtagagacagggtttcaccaggttggccaggctggtctcaaactcctgacctcatatgatctgcctgcttcagtctcccaaagtgctgggattttaacttttttttttttttttttgagacacagtctttctctgtctcccaggctggagtgcagtggcgcaatctcagctcactgcaacctcggcctcccgagttcaagtgattctcttgcctcagcctcccaagtaggattttaactcttttttattcccgccaactatctttggatatgccctccctcctcctgatcctcactaaagccagacattagagtgctacaaagctgttccaacttgcaatttaaaaatcaaggatcacttaccatttggctgcctctgttggctgaaggcatgtatatccatgggagagaagatgtcagaatggatttcacgcagaccctcaccagtatacttgttgcaagccaaaatggagtgtgtgctccagtcagtccagtacaatatgtcctcaaataacgtcaaggcaaaaggatgtggaagggaacctttaaccactgcctgcctattaacataaagagaaaaatttaaacttatttctaaattttcttcttctatcataacgtcacctctcccattaaaatgatcttagttcacattaacacatacaaatcttgagtaatacataccaataggtcaaatacacctataaaaaataattcacataatgaattcatatatatttttaaggtgtccaaaagccccaaacaagcatttgggaatagtccctaacttggcagcagcctcaagttcagtacaagatacccggcagagagagagcactgctttttcattgtttgcactgctgtcaaatcctactcttcaactaccatctctggactcacagcttccaccctttcacacaattcatgtcatcagacagagaaaggtaagcaatgagaaaaatcacaggggttacagttggcactgaagtagatttatatcagcaataggttttttccttcttgatgtggaagaacaaagaacctgagcctgttttgtccatcacttcttatggttttgataactgagaatgaaacataaacatgaggccaaaatggcatgcaggtagcactctccccgcaaaccccagtctagctccagcaagtgatcatcttagctgacttttcactatattcaggcagccaaaaagaagtcctgttagtggtagaatatgttcatgagacaaagcagatccaaaattttcacaagcaatacatactttttaaaaggaaaagtagacagcctagttagtacttaaggcacagaactttgtagagtattagagagagttatagaataagcaaatgctgagggccgggcgcagtggctcacgtctgtaatcccagcactttgggaggccgaggtgggtggatcacaaggtcaggagttcaagaccagcctggccaagatggtaaaaccccatctctactaaaaatacaaaaaaattagccaggcgtggtggtgggcgcctgtaatcccagacactcggaaggctgaggcagagaactgcttgaatccaggaggcggaggttgcagtgagccgagatcgcgccactgcactccagcctgggcgacagagcgagactcatctcaaaaaaaaaaaaaagaaaaaaaaaagaataagcaaatgctctggaataatgaacaaatcacgttttgagtcaaaataatattcaagaaaatacatgttttgatattttcataaatccaagtttcccaatagcccacccaggaggcagagatgggcagagagggaggaagggaaagaaaaatgaagggaaaagggaagggaaagcataagctactgaagagaaattaaaagtatcatatattttaaggaagatgattcaattttcaggtccttgaggttaactgatgatttctactatctaacagactaccagcatattaaattaaaagcaattaaggtcatttttacgtgtaagcaggattaccgtctgtgattgcacatggaatgatcttagtctaaagcattataaattcagacaaaatacctgcactgccaacccatatcaccagttttctcattttccttaatcctctcttccctaagtaaaaagctcactattccttctaatttcccaaagagaactgtcacaataccttctcctgaagtgctttcttccactttttaaatggacagttttattaaatttactaaagagactatattatttacagggtgatggcacagtttatgttcaattttaaacaggcctgtatatttcacactaaagtcttccaaaattcatggtggaaacagagagagaactgagaaagctgccaaaaaagacaagtaacacaaatgaaaaataaagagtagttaaaactaagttacttggcatttcaccatcttaaagaactgctttgaaaaactcaaggaaaaaaaaggcttcaaaaagttttgtatatcattaagtgaaaagttgaaattcactctactgaactaaacataggaaaataaacatatggaaaaggcaaaatccctaaaagctatattcattttatatattaattgaatgcataaacttagaactcagaggtgagcttaaatccccccttgacacttattactgacaccatttctgcaagctttatttcttcatctgtcaacggaaggtaataatctatcctcactgcgttaatgtgaagattaaataacatacgcaaaagccattcagcactacgcttgctacttaacactttcgttaatgattcctcaattttaagacacatattttcaatattttaacatttctgatataagggtaacatttacaatgtgaatatttcatgtggtagtttttaaaatcagtaagttcttaaaatcaatggcttattagaatcagtaaatactatactaatattaattttttttttgagacaaagtcttgatcttgtcacccaggatggagtgcagtggtgtgatcctggctcactgcaacctccgcctccagggttcaagcaattctcctgcctcagcctcccaagtagctgggattataggcatgcaccaccatgcctggctaattttgtatttttagtagagatggggtttcaccatgttgaccaggctggtctcaaactcctgacctcaggtgatctgcccaccttggcctcctaaaatgctgggattacaggcgtgagccaccgagcccggccttaacactaaatataaatgtcactttcttttcatagccattcttaatttcctcccgccacaagccaagttagttttctttctctacgttctcataacagttagtgaactgttttataactgttcacctatccagcaactctataacagatgacctttttgagagtaaaactctagcttatttatataccaaggatcccacacaatggtaaggtgtacaaattaggcagacttactaaacactctggggatgcttgataaaattaaatgtttttaagaaaatatgtaattaacagagctgaacaaaaggcagaactaagaacactatcatgcaagggtgatataatgatttgtccagccaactatgacttgttcctgaaagtagggataaccacacagagtattcccctttcttctctctggctgagattaccaagtaagcctacctcctgatccccatctggaaacacaagttacttcaaggaggagttgatcatggctgctaagaaccaagctggcaggtaagatccaagcccagttcctcaatagtaggtcacaacgataacagaaactaaaaaatggatcaccaaactggggaccacagaaaagaaacagagactccccccaacctcactgaagttttcatatagtgcttgcaatctctgagcatcatctcctgcctatgtctgtcacattctgcaacttactgataaagctcaccactgccaatacctcccaggcacctcttgctagctctttgagattctttgaactctgcaagtggttcttttaaactctgcaccaactggacttatcctttataaaacacctgcatgccctcatttagtttttgtttctggacctcctcacagatagtcatcttctgctcctctctcagaactgcccacttgtgtgagtaataaatctttctttaatcataccacaggactgctgtcatgagttctgacatctgaacttaaccttggaaggaagcttcccttcaccacagtgaagctgtaataatatctaagaagacaatgtcagcagtgatggcaaagctttggaaaaatctccatgaatcctccatgtgaaaacagagaacaactaggtaatgaaccccaaatcccatggacaacattcacaacaaagctaggtaaaacccaagatacaaaatggtagagaaaactaccaacagccattaagatatgactgatattggcacctctgcaggatatgagaaagaaacaataggacatctggcaggacagaacacataaaacagacaacattggaaagcttagtagaccaatctgagaacagcaaccagctatgaggtgttctggccacttcaagagtaagtgaatacaatgaattcatcgtcaggcactgaaaggtctagcactatactttaacctattgtgaactctcaaaattgtccttcccgggctcccttccagacaaagcgtcatactgaagagaaatcactgggagcggactgaaaagtgtgcatgattggtacaggagaacaatgggaaaataaggtacagaaaaaagcagaaaaagtaaagtgggagagccaggaaatccagaaagctagctgccattattttttaaacacatatacatagacatgagagttctgtgaaactggagaacttatgaactctgccttcttctgaatgttcaagcaaaacagtttcacctgaaaataagaaaacaaattactaacatcaaatcccattaataagttaatattaaaaataagaaaaggataaagtgaagaataacattcctacagacaataaaaaagtatgccagaaagatatagaaatagaacaaattaaactgataacttatttcaaaacagtcaaagtatttaaagtaagatactagtcataaatgaacaacacaaattagaatcagacaactcacaagtgaggggacagaacttgaaagaatgagaaatacaaaaatacatcatttcagaaatgaagtctacgaaataagaatgaataaacataatacataaagaaaaaaatgaaaaggaagaaatattacataatagaaaaaaatattttcaaaaaataaaatatttgaaggacaaaggacaaggaagagaacagaactatactggaacaaggaaatgactccagatggtaacttgaaccctcaggaaaaatgaagaataccagaaatagtaaatatgcaggttaataaaaaagactctataaataatgttttctctttttcctttaacctttttaacagacataagattgtataaagcaataagtataaccctgtgttagatataatagaaatgaactataaatgacaataatagcagaaaggatgggagagagaatggagatatacttagagtaaaatgtatgtacttttcataattaagttaatattaccacaaagtagattttgacaaaatgcacgttgcaatccctaaaataattacctttaaaatccccaaaatacagtttaaaattatcaaccaaggaatcaaaatgacacaccagaaaatatctacttaatacaaaggacaaaggaacaaagatgacataagataatttaaaaaaaaaaaaacactaaaatgtcagacataagcccaaccatatcattaatgacattcaatgtgaataaacacaccaatcaaaaggcaaaggctgttagactgaataaagcaaaggttacactatatgctgtttataaaagcacattttacattcaaagatacaaatagattgaaaagaaaaggttacagtagacagtaaccataagagagctggagcagctctatcagacaaaaaagattttaagtataaaaaggtaactagagatacagtggcaggttttatgagaaagagtcatcaggaagttacaattagaaacatacaggtacctaaaaacagagccccagaacaaatgaagcaaaacctgacagaaatcaaaggaaaaatgggcagttcaataatatagttggagagctcaacaccctattctcactaaaggaaagaacaactagatagaaaattaccaaggatatagaaaatttgaacattattaaccaacttaacctactatctatagaacattccatgcaacaaaagaatacacaatcttttcacgtacacgtggaactttctccaggacaccacatgctaggagacagaattaatcttaaaagactgaactcatataaaataaaaagactgaactcatataaaatagactactatctgaccataatgaaattcatgaagaaatcaacggaagaaaatttgggaaatcaaattattttctaaatttttgaaatttctttctcaatttcctctaaatcagcaatgagtcgaggaagaaattacaataaaagtttttaaatattttgagctaaaagaaaatgaaaatacaaaatatggaaacgtatatagaatactaatgcctatactagaaaagaagagagattacaaatcaattatttatgatttgaccttaagaaactgtaagaagagtagattaaatccaaagcaagtgtaaggaagaaaataaaaacattagggttaaaaaaaaaaaaggcaatgaaacagaaaacagaaaaacaataaagggggaaaaatcaataaaaccagaagctggttgttctttgaaaagacccacaaaattgacaaccctttagtgctagactgacccaaaaaaaaagacgcaaattgtgaaaactgtgaataaagtgatgaatgaaagagaaacactgccttacagaaattaaaaggattattaggcaataccataaacaactttatgccaacaaattagacaaatttatgaaacaaaaatattcctggaaaaaaaccaaattactaaaactgactcaagaagaaacagaaaatctgatagatctacaacaaacaaggaaattgaatttgtaattaatatcttcccaaaaagaaatccccatgcccagatggcaggaaaagttgtatcaactggtcacacacttttccagaaaacaaagaaagaggaaatatcttccgactctatgaggctgatattatgctaatctcaaaaccaaataaacacaagaaaaacagactacggattaatatccttcactattaaagacataaaaatcctcaacagaatattagcaaaccaaatctaacaacatttcaaaagaagtataaaccacgaccaagtagaacttaccccagaaatgcaagatcggtttaacaactgaaaaccaattactgaaattcaccatgttcataaaataaagaataaaaccacataatcatttccatagatgcagaaaaaggaacggacaaaatccagtaattattcatggtaaatctgtccatgaactaggaatagaaaggaacttcctcaacctgataaaatccctttattaaaaaaacctacaggtaatatcatgctcaagactatttttaatcttttttaaaaaataaagccaatacagagaaaaacatacaaaacaaacatatagcttaacaagttactataaggcaaacactcttgtaaccacgaattcactcagatgaaggaaaaaaacttgatctgggtgaatcacccagacgacttcaaaaggccctgcatgaaccctgtcccaatccctccctctccatagaagtaacaattattctgattttctattagtcactttcttgcctttatagttttattgctttttgtaagtgtgcatccacagaaaaatagtttagtcttaagccccattttcatttgctatttcttttaaagtctctgttttaaaaaatgtttaactggtacataataattacacatatttgtggggtacacagcaatgttgcaatatatataaggtaccgtgatcagctcagggtaatcagcatatccataatctcaaacatttaacatttctgtgttggaaacattcagtatcctctttgaaattatataatgttttacctattaagtacagtcatcctacagtggtatagaatactcaagctttttctaactgtaattctgtattttttagcaaatctcttcttatctcttccttcccagcctctagtatcccctattctactctttacttttgcaagatcaacatttaccttccacatacgagtgagaacatgcatggtttaattttctgttcctggtcctatgtcacttaagataacatcctccaggtctatccatattgctgagaatgacaggatttcattctttttatggctaaatggtattccattgtgtatatataccacattttctttatctattcatctgatgttggacacctaggttgataccacatcttggctactgtaaatagtgctgcaacaaacataggggtgcagatgtctcgatacactgatttcctttcctttgggtaaatgccaagtagtgggactactggatcatatggtagttctatttgtaattttttgaggaacttccatactgttctccatagcggctgtactagtttatactcccaccaacagtgtataagagttcccttttctgtgcattcttgaccgtattattttttgtctttttggtaatagccatatggtaactagggtgagatgatacttcattgtgaatttaatttgcatttcctggatgatttgtgatgttgagcattttttcatatgtttgtggccatttatatgccttcttttgatacatgtctattcggatcatttccccattttttaaccaaactggttttttgctgttgaactgtttgagttccctgtatattctggatattaatcccatgtcagatgagtaatttgcaaatattttccctcattctgtaggtcgtcttttcactgtgttgtttcctttgctctgtagaagctttttagtttgatataatgcatctggtattttttgcttttgttgcctgcatttttgagatcttatccataaaatcctttcccagaccaatgtcctgaagcatttcctctatggtttcctctagcagttttatagtttcaagtcttacccttaggtctttgatccattttgagttgatttttgtataaggtgagaggtgggtttctagtttcattcttccacatgtggatatccagtttccccagcatcatttattgaaaagactatcctttccccaatctatgttcttggcacttttgtcaaaaagcaattggctatagatgcatggattaatttctgggttttctattctgttccatcggtgtatgtttctgtttttatgccagtaccatgctgttttggttactacaactttgtggtatattttgaagtctgttagtatgatgtctccagctttgttctttttgctcaggattgctttggctattcagggtcttttatggtcccatacaaattttaggatttttttttttttctatttctgtgcagaatgtcattggtattttaatagggactccactgaatctgcaggttgctttgggtagtacggtcattttaactataataattattccaatccatgagcatgaaatgtttttccatttgtatgtatccctcttcaatttctttcatcagtgttttgcagctttatctgaagaggtctttcacttccttggttaaatttattcctaggtattttattaatttcttatagctattgtaaatgacactgccttcttaatttctttttcagctagtttgttgtttgtgtatagaaatgctactgatctttttgtgttgattttgtatcctgcaactttaccaaatttgttgatcagttctaagaatttttttttttttggtagagcgttcaagtctcttttcctgtctgtctcttccttacaatctctccgttaaagtacctaagatatttcatttatatgtccagatctgctgatgtactctcatggtgcagttcaatgtttctctgtcctctgtatttcctacaaatggccagctgatatacagccttgaccagactcatgatgaattgatccctttgacaaaatagtaggcagtagtgtgttcttacaccagaaggcaaataatgtctgttctttttcttcttgtgatgttagtagccatcgacgctcaccacctagacccattcgttcaccaaagttataaaatggtggtattgcaattctgccatttctttttcatttatcaattgaaatagctctcccatatctactattttgttagccagaggtacactcacataggaaaagcaggataaattgcttctttcttgtatttaccaatgttcaaggtaataaatttgttcctatcatgctctaatctaagagtaaccaattcctttttaaaataccattatgaactcaagaatttaaacacacttcacaggtttctaccgatctctggccagtgggaattctacagtcatttctccagtctttctgaaatgaccctaaatagtctttaacagcctccttactaactgttatgacaatgttccagctcagcatgtacatttcttgcccaaaacctagaatcagcaattttgccagaaaggcttggtttcttttaaggtggaatggtttttcccaacaccacaatttgggtgctacagaagttcactgcacacagcactgtaaatgttcaattgctactcaattggtcatttttgatctagtcctcttcagtgttcacagtcaggaaacaaacaaacacagttgggtacatatatttttgaaagataaaatacctaataagcgcatactagtaagtaactttccattaaaatatggaataatcagtttgacttaacctctgcagtattacatctatacttcctctcttgcccattaagaatctagcatatgcaggagcaatatatgtcctaatactcacttacttgatgcaacaatataaagtttcagaataacaatattaattatgaccacaacaatgtagttactataagaattaaatttatggccaggcatggtggctcccacctgtaatcccaacactttggtaggccgagacaggtggatcacttgagtccaagagttcaagaccagctgggcaacatgatgaaatcccgtctctactaaaaatacaaaaaattagtcaggtgtggtggtgtgcacctgtagtcccagctacttgggaggctcaaggtgggaggatagcttgtgcccaagaggcagaggttgcagtgaacagattctgcaacctctgcaaaattcaagcaattctcctgccttagccccctgagtagctgggattacaagcgcccaccaccatgctcggctaatttttgtattttttgtagaggcagggtttcaccatgttggccaggatggtctcactcctgacttcaggcgatccacccaccttggcctcccaaagtactgggattataggcatgagccaccatgcccagtcacaaatcttcttgtaagaaactttttctatagttgttcatagttgttctattcccttgctttgcttttctttccaaagagtcttattatctgtatgttgtttcttctttgcctatcttcagtatttatcattttctctcaaatcatcttttgtctttctgtatttctttttggtctttaaatttttcctccttttcaacctctatttaaaggttttttggtttattcaacctagtgtcccttctagttttcttttctgaagtgattttttaaattctttcttaagttctatcatttcatttctgaatttttctcttttttttttttttttttttttgagacagagttttgctcgtcacccaggttggagtgcaatggcacaatcttggctcactgcaacctctgcctcccggattcaagcgattctactgcctcagcctcccgagtagttgtgattacaggcgtgcatcaccacgtccagcaaatttttgtatttttagtagagacggggtttcaccatgttggcaaggctggtctcgaactcctgacctcaggtgacccgcctgccttggccttccaaagtgctgggattataggcgtgagtcatttctgaatttttctaatcttatgttatcctttcacatgtcatattggttcctcaatgacttttgactcatttatttatttaaaatttaaagaaaaaatttattgaagatttgaaaaataattcctaaaagattgacttttccagaaaactagctacacaatgcatctcatctaccatgttaaaatgtgcactagacacaaatacaaaaaccatgcaacaagccaccattcttcaacaatttgagcaaagttaaatgccaaaggaacaacatggatgacttgcaaagaatgggctatttaagcaccatttaaaaaaaaaaaaggagcacaaatggatgagtgtgttcagttatatacactgaattgaacctttggcactaggaatcacagcattttgtcatatagcatgaacacatattataaaagtacgtagggtcaaaggaacaggaccaccagcattcaaaagcagctctgtcaactaggcaataaaacactctatagcatgtgtctctgttgtccattgttgaatacactggcaggaactttgaagtgaaaaaaaaggtaagataggaaaaaaggagctattactccttttattttctctgtttaaaattaaacaggaaaacatcaattgttgtacaataacatcttcaaagtgcatcatttgtacaaaagaaagactaagaacaaaaatgtgtttacagagatccaaacataagtgagtgagagcgtctctcagacagctttctgatggttctctggaggagccattcataattgctgggcactaaaaaatgttgcagaattctttgccaggtactttagggaactgtgaagataattcagtaataaaacaaggctcggccaggcacggtggctcatgcctgtaattccagcactttgggaggctgaggcgggcggatcacgaggtaaggagttcgagaccagcctgaccaacatggtgaaatcccgcctctactaaaaatgtaaaaactagatgggcgtggtggtgcgcacctgtaatcccagctactcagaaggctgagtcaggagaatcgcttgaacccgggaggcagaggttgcagtgagcttgagatcatgccactgcactcccacttgggcaacagagcgagactccatctcaaaaaaaaaaaaaaaaaaaaaaaaaaaaaaacacaaggctcttctcatccagaggtatataggccaacattgctccaatttgtacatcagtagatgtggtgctccataaaccttggacatgagtgcatgagggtgatctgcaagaatttcagcatactgtggtctgtcaaacttgcagagtagctgggtgcccaacatcacattgaagtattcttctatccctgccacaacttcattaacagcatactcattatctgtgtttccacgagattttttgcaatttgcataatcctggagaatggaatccacattcttcctggcagaaagaaaaaagagatgtttttgtctggtaattaagtcccagtcatcaacaagccatggtttcagctcttcaggaatcttcactttttagcttcaactctgttcatgaatgtgtcctcattttcaagagtaggatctacccgggggcccttttcttccaaggaggctgaggcatctcactggtactgccaccatctccatttccaggtattttctgtttgttcttttttgttttcacttcaacattttctgttgcagaccagatgtcttctttcttggggcagcccctctcatcttcccctctgcatactgctcctgatgggctttttgaagttgtttctgcaaattggtgtccacgtatttgagtactctgctctctggaacccatgcatcccaatttttattccaaccactgtaatatataaagtattttacttgtttgtcctttatggcaacctttacacattttgcttcataaagaagcagcccatgaaagcacagcacttgctcaccctcctggaacttagggtttgagtcctgcttccacgtcatttataagtgattcgcagcctcctccttctccagctcattttataatagagatttgatctgttctgtggtcatgtttttctggggtgcttttatttataagagcttttgttttttcctttataataactttaaatgggattttaccttgatacttttctgtttctcttgtctacgtaaaattagtgttcctgaacttttaaaataatgtagagttcaaggtagtttttctaacgtcacagaattcattcctctgttgttttcacataatgttcaaaaacctagtagcttgctttctgagatctactagccgttgatcttcccatctttatctgaaccttctctttccttcccctcctgttttactctattctattgtccctatcctgctcaatttggattattctatcctattcaattttgttttaatcagtgtggtgctctgtcctggatgagcactctggcaggttcatttcagtagttccattttgagagttcgttggggctagactgctctagcttcttctgtctttaccatagtcacactgcacttgcctaatattggagtgggcaaccctcccaccctcctatttcagctgctgttcttaaaataacccaccatcttgtccagcaaatagctgtggctattttggcgttcccctgctttcaagtcttatgagacaccctgttaaatctccctgcttactctcgcatagacagtgataacatggaggtcttgtggctgttggtggtttgcccttatctagttgtgctttcaaatgactaaggctatagtcaactttatccatgtttttggatttgctatctagtttctgtaggttttagttaaaaacaaaaacaaaaaaactatgacatggccacatccatcttcctagactccccctcacagccagatttgaggtcaaaaacagcagttgtttctatattcatcatatacttactttttgacatttaaatttacttaaaaccacattgttatatgtcatttcactcttttttgaaagaaggcaaaaaatactccaactccatgattacaaaaagtttaactgaattctttatatctttcctggttttcaatacttctaaatgttccttattcttagttcaggtaattgacaaatgtttattatactttgaaaaaatcctacagtcaccaaaaactctcatctggtgaggtctcagattgagatcaaaaaccaaaattatcattaaaacacaagaatccaaatataaaatgtctttaaaaatctgaacataatctgagaagaaattccatgtttatgttttacagactttgtcttccttgaacactgaaatgtatggtatatgcagtaggttttctccttgtccagagatgagcaaactacagcccacaggctcattctgctttacaaataaagttttacaccaggtgctatggctgatgcctgtaattctagcactttcggaggccgaggccggtgaatcacttggagctcagggcataagaccagcctgggcaacatggtgagacgccatctttacaaaaatgacaaaaattagcccggtgtgatggcgtgtgcctatagtcccagctactcggaaggctgaggcaggaagatcgcttgagcccaggagacagaggttgcagtgagctgagatcacgctactgcattccagcccggatgacaaggtgagactctgtctaaaataaatacgtaaataaataaataaagttttgctgcaacagtcatgcctattcccttatgcattactatagctgcttttaaactacagtagcagaagtagttgaaccggagatcataagcctaaaatatttactatctgagcctttacagaaaatcttggccaaaccccgtcctagtgtagagttttatcaaagttccattagcaggacttggggctttactggtaattttgagtgggacactctttgttgtactgatgcccagcacactgcaggatgtttagcaaccttggacctcccctccaccaccggaactaaaatactagtagcactcccagtccttgggttaaacaaaattctctacacatttccaaacaaaggcagtaaagatgctacccctggtggagaaccactgaagaactaagttagctcagagtaaggaaagaggaaatacagtctgtaaattctaaatgctatcaagatggatgataaatgtaattacttttaaagcacttttaaagagctaactaaaagactattcttcttcccctctggcacttagtcaaaaataaacatatttcttaataaaattaggctttgtaatgtatcaaggcttcatcgagttttcttaaaagttttttctaattcttgtaatcttaccgatttgttccatccagatttgatttgtggatgaaattaagttttgcatctgcccaataaagctt

SEQ ID NO: 16 - DNA, 189539 bp, Homo sapiens
gaattctattttttaagatagaaggaagctcaagaaattatctgtatagttcctatccttgagccaatgaaatattatcattcttatttattaattgaggcaactgaaacatgcagatgaagcaatttatttaaggttgcaaagtgaagtgcacaggcttacgtgggcaatggggacagaggcagggaggggagagagggtgatcagaactaacatcccaatttccttcttacacagtgctccttccacctcgtgaacacacctcttaccaatcaattgccatttactgaagaaatccaccttgaaaaaagaaaaggaaagataagcaacaaaaatatatacattgcccaaactgacaaggaaattactttctttaaaataatgacaggccagatgccgtggctcacgcctgtaatcctagcactttgggaggccgaggtaggcagatcagttgaggtcagtagtctgagaccagcctgaccaacatggtgaaacctcgtctctaccaaaaaatacaaaaattagccaggcgaggccgggcgcggtggctcacgcctgtaatcccagcactttgggaggccgaggcgggcggatcacgaggtctggagatcgagacaatcctgattaacatggtgaaaccccatctctactaaaaatacaaaaaattagctgggcgtggtggcgggcacctgtagtcccagctactcgggaggctgaggcaggagaatggcgtgaacctgggaggcggagcttgcagtgagccgagattgcgctgctgcactccagcctgggcgacagagcaagactccatctcaaaaaataaattaattaattaaataaaataaataaataaaaaattagccaggcatggtggtgcatacctataatcccagcctgagctcagaagttggagaccaccctgggcaacacggtgaaaccccgtctctgctaaaatacaaacacttagccaggtgtggtggtgggtacctgcagtcccagctgcgaggctgagggatgagaatcactccagcctgggtgacggtgtgagtccctgtctccaaaataattaattaaaataaaataatgaccattgttacctgatatttttaaccttagtgttgtttcaagccaggagggtaatcatcctctgagagtatagaaccatttattcatttggaactatgtcccatacataatttcctattaaaacaaactaacaagcaaatgctcccataggctgccacagtcagttcttccctgtattcattctctttctctctctctctttccttgtttttagagggagatggggtttcactatgttgcccaggcttgtctccagttcaaagcttctcgagtagctcgggctgtaggtgcatgccaccacacctggcttccttgtattggcttattgcaatttctggtgcatacaccaatggtggcaagtgagccaaatattatcagcattctggccagccaaagccattttcttccctgcctcagcacagtctcacatagcccaccattgtcttgcctattcttgacagtttgcaagatctgtgtcttctgtttcttttttatttcactcggtgccctatctataattataatagatactcaagagataacttgttgacttgataaagaaaacaagaactgcagaacactcagtgactttttacactttcttacccatttctgtcttagatattgttatttgatagctccttctcaatctacttatagcctgaatctatatcagaatttatgcagatgagttgcattgagaacacccatttttagactacctaatcctggtttttcaaccaggtagagccattcagccagccccagttttgctaggttagctcagttaataagaacagaagcaaaactgattaattggattgtgaatcctaaccctggttgaccaaaggcaatagacagatgttactttgtcctttttagaaccaccatgcaaatgatataaatttccttgattctgccctctactcttttctatttgaatattttctctctgggcagttttatccatttagcatcatcataagtaatatgctaatgactcccaaatctacagttctaaaaccaacctctcctaagagctgaagaccccaatttcttagggcctcctacacaaccccacatggatagtctgatgccaccttaaaaataagatgtctaaaataaattttagcattttactcgaatctatttctctcactgttaaagatatcactatctttccaaacataatggcctagaactccagtcataatttcaactcctctgtactgtcctccccccctacattgggatagctcaggtggctcctcaactcacaagaagttcccgtgtggccgtgaatataatgccttcctttactcataaatcatgatttttatggggtctgccgaaaacagtacctcattgccaggtccagtgactagtgcaattggtggatatttggccccagcccatcaattcctctctggaaaccttcagactggcccaggagaagatcccattcttcttgagttcctcagctagaagaacacacctcctgaaccaactatggccatgaccctcaagcttggagagagtctctaccgcagagaagaaaaaagccacattcagaaaggggatatggaggaagaatgacacctgaggccctgattcgttgtccctacctggctgtatctctgtctttcccaaagttaggttcatcatctgactttgcaaatacattttccttttttttctttataatgagccatgttgggttttcatcatttacaaagtccaaacttaaaacttttcttttttcacccatgcttccccttgccctgaccagataggaaaagatttaatcagttgccaaattctgtggcttcttcctcatagacatcctccatatgtgtcccatccactccatctagcccaggccctgggttacagtaatggcttccttaccacattcccaaactctaatcttgcattctctaaacatcctccaattgccgtcaaaaagcttctaaaaaaggtatggtggtgtgcgcctatagacccagcatctcaggaggctgatgtgggaggatcgcttgaacctgggaggatcgcttgaacccagggggcagagactgcagtaagccaagatagctccacagcactccagcctgggcaacagagcaagactctgtctccaaaaaaaaagcttctaaaagactaaatgtggctgggcacagtggctcacacctgtaatcccagcattttgggaggccaaggtggaaggaccacttgaggtcaagagtttaaaaccaacctggccaacacggtgaaatcccgtctctactaaaaatacaaaaattagtcaagcacggtggcaggtgcctgtaatcccagctacatgggacccgggaggctaaggcaggggattcgcttgaacccgggaggaggaggttgcagtgagttgaaatcgcgccactgcactctagcctgggtgacagagtgagactctgttttaaaaaaaaaaaagaaaaaaagaaaaaaaaaatactgaatgtgtcagccttctcttcagtagtcttcagtggctccctcgaacccacagaacaaaaattaaactcaaatggcctcaaacatcctatgattttggcacttgctttttttttccactttgtctctcagtatatccttcaggcaaacatgaccactcacttatcactaaatatttcctgaattttcctgtctctatgcttgcaattttctctccatctaccagaatacaaatcctacccattcttaaaatgccacttcttttttttaaacctttgtttgttgtttttgagacagagtctcattctgtcgcccaggctggagtgcagtggcacgatctcagctcactgcaaccttctcctcccaggtccagggaatcctctcacctcagcctcccgagtagctggggtcacaggcgtgcaccaccacacccagctaatttttgtatttttagtagagacagggttttgccatgttgcccaggctggtctggaactcctggcctcaagtgattaaccctcctcagcctcccaaagtgctggggttaaaggcatgagccaccatgcctggccatatgctgccttctttatgaaacataaaacctcccaaacatcagcaaactacattttctttgcttctagagcacttgatacctttactttgctttatactacagttattttaatatgtcttattttccttttaggctataaaatttcttgaggacagaaacttctatgttaaccattagtaccaaacattaataagttttcaccaaattgattagacatgtatatttggaaagagggtttgtttctcctcttatttcttcaaactttaattcagtgttggaattaatgcttccagtggaaactgtgagacatttattacgaaaatctaggtaactgcatcattttctatcctaccattctcattcatttcctctgtaagaggagtcccagttcaaaataatttctgggagaaaatcgaatgcctgattctgtcccattaagaaaaaacatcttccagcctcactccctttcttctttccttcttccttccttctttcctgtcttctttttttcttttttctttctttcttctaagagataatcagaatgcaagctatgggccagatgcggtggctcatgcctgtaatcccagcactttgggaggcctaggtgggcggatcacaaggtcaggagatcgagaccatcctggctaacgtggtgaaaccccgtctctactaaaaatacaaaaaaatcagccgggcatggtggcaggcgcctgtagtcccagctacttgggaggctgaggcaggagaatggcatgaacccgggaagcagagcttgcagtgagccgagatcgcaccacagcactccagcctgagcgacagggccagactccatctcaaaaaaaaaaaaaaaaaaaaaaaaaaaatgcaagttatggcttaggtataattgtaggtgccaaactaaagtcaacttttatttgtgactcttttgccattttgtcaagtcagcagttcatcttctctctgatctatgaagactgcacctgaactagtttgagtcatgttatttgtatgacataaaaatggggcatctgataacatctgctccctttctcttatccaaatcacgaatagcgttcctctcccttcccttagtcaccagcttttgaagatttacaatctgtgatagtaaaaagaaatggattttgaactctaagcagtccagttaaagtaaggaagccacaagagaaggaaacacagagtgaacccttaataataaggacttttctgtgtgcaggaatgagctatggaagatgggagagaagaatgaggatggatgactaagagcaatgaaagcttacaaagaaacccaagaaggcgaaatatttgcttatgaataaacaggaagggaagaaatagctttctgcctttcttgtagtagatactcaatagccatttatgtaagaatttggacagtccttaaaagataagacttgcattcttagaattgagaatcaataagaaaaactattctttgagagaaccatggttattttaaggctatgggatgacttatataaatggtttgaccagaacttatttaagctcctatccacatacaattctatataaactgagttttagagagtctttggttccaggcatttatagcctgaaactatatcaaaatttttgcagataagttgcattgaaaacagttgtttttagacaactttatcctggtttttgcaccaagtagagccattcagccagcctaatattgctaggttcacacagttactaggatctgaaacaaacctgatcaactggattccgagtcctcaacctggttggccaagggcactagacagatgttactgatacagagtcaaataatatataggcaactgatctgatatggaaccagagagttgggatatggtagtgaaaattgcatcagatttctgctcagaacaacctgagtttgaatcttggctcccttgtgtagactttgagcatatcactcaatttctctggttcagtttcctgtggctgtgaatgaaaaactccatttctctcagattcagcttcctgtgaaaaattggaatataaagttgtgaggattaaataagacaatgtataagaaggtaacttagagtctgcaaagtgttatgtaaatgtaaggtattatgaatttttggttatggacttgttaacaaagtgatgtgttaacattatgcttaagcaaagggtttccattattagatttgagagcaggagaattatgtacaatatatatagagacaggatgagccatccactaattcaatactaattcaaatgtttattggcagcatagcatactatgtgccaggagtgttttcagtgttggagatacagcagataaaacaaaaagattataatacctgtcctcagggacagcatacagataaacaatgaactagtaaaaacaaagagggctggctgggcacagtggttcatgcctgtaatcccagcactttgggacgccgaggcgggcagatcacctgaggtcgggagttcaagaccagcctgaccaacatggagaaacccagtctctactaataatacaaaaattagctggacgtggtggtgcatgcctgtaatcccagctactcaggaggctgaggcacgagaatcacttgaacccgggaggcagaggttgcagtgagctgagattgcaccattgcactccagcctgggcaacaagagcgaaattccatctcagaaaaacaaaaacacaacaaagagggctgcaaaaagtcacttaggtcaaatttgggattatatcactgtgaagttcacgtagaatgatatttttcagttgctgatgtcacaaaaaaaagtgaaacaaactatatatacacaactaatagacactaaactgatttttaaaaatctcagattatcaggagggagtcacttctaaagtcctccccacctccaatcactactcccctgcccaacccactcccacaagaattttgactggttaagaactggatcgaggctggacagaagatgggaaccccgtgctttatatctggggttaatgtccatgatatgacagaatgtgtcttggagaaaagtagcctcgggaagggaaatagagacagtcctgggtggtgggcatagaagacggtgggaaggtggcatctaagcctgaaggtgagggagccatccacatggagatctgggggaatcccatgcccaccaagaggaacaaagagcagatggccctgagctgagagcacatctagtgtgcacgggagagagcaagggggtcaaggaggccacggaggaataaagggcggggtggtggtggcaggaaaaggttaataaaaaagaagatcagaggtaactgggccagatggggtggggagagccacgaaagacactgaacgtcatgttgtaggaccttcttcttggttcagctgaaagccaggttcttgtcacaaggccatgagagattcggttcgcatacaatttgaatggcgagaaaaatggaatatattgggcaaaaaagaaaaaaaaaaggaagggggcggaaacaggaactctcagctgagcgagagtcttgttagcggctttttctgcctcacagattgaatcccaggtaccaccccggaccaggtggggccaggctcctcccacctgcaaatggcgggaacctccccaggctccaccccagtgcgcattcctcccagtgcgcagacaggtcggaggttctgcagggagcccttcccacctggctgtctctcttactctgggtgagatggggagctgtcgaaagacgttgagcagaagagtagcatgatctgaatgctctccaggataactcaggccactgtgttgagaacagactgcaaggagcaagcacagagcagaaagcccagtgaaaagccatagaaataatccagggtagaggtggggacctggaccaggatgggagtggtgttcatgggaagtggttggatttggtatgttgtttgcaggtaaaaccaacaggatttgctgacaaattggatgtgaggtgtaagagagagggaggtatatagatagattccaagcttttcagcctgaacagctggaagggtcaattggcattgactgaaacaaaggtgagcaggaattggcttgagtgggattagcttgagaagtcaaggatcatttttccacttccttctattgtggtaagtgagggagtcaggatttaatgagcaaagaaggagaaagaatttagccaattggaatgaaaatggcattccaagagtaggtgagaacatagatgcaaaatatgagggtgaatgatgggcccacctagtgagtttgctggaacggcttagagcagatggttgagttgaggagtagggaggagaaggcaggaagttgagggagcacaagatgaagacttgtatcttgttgttttaagattccatcactgaggccacaggagcaggcaggaggtaaaaaacaggtggtagacgatatcctgttggttgtagtcttgagatgtgtgagtgaagagcaaggtaagaatttcaacaaagacaacaaaggtaaaaagaaaatatcagtctatggcatatagatggggagaaatcttaagaaaaaaaggctggatttagaatatatcatcctcaggcagggcgtggagactcatgcctgtaatcccagcactttgggaggccaaggcaggtggatcacctgaggtcaggagctcgagtccagcctgaccaacatggtgaaaccccatctctactaaaaatacaaaaagtagccagacatggtggcgggtgcctgtattctcagctactcaggaggcaggagactcactagaacccaggaggcggaggttgcagtgagctgagatcatgccattgcactccagcctggggaacagggtgagaatccgtctaaaaaagaaaagaaaaagaaaaagaatatatcattctcatggcaggaagagtaaaatatatttttaggtggccttccatttgacttactctccgtccaatctattaacttctgtgagttccacctccaaatatttcttggatctgcccacttctattggtttccactgctaataatctgttctaggttactaagatctcttctctttactattgcaactgcttcctaaatgtccctccacttctgctcttgtcttcttctaatttatttcccatataggtataagaaagaatatattaaaatgtctatcaaacattttcagatatctgggatattctttttaaagttcaatgattccccatttcacttagaataaattataatgataacagcacacttgtggcacatactgtgtgtcaggcactatagtaacagcattacacagattgatgtaagtaatatttaattctatgaagcaggtgctgttatcataatttatatctatcaaatgaggaaactgaggcactgggagctgattcattcaggaggtctaccttaacttggatttcccagaaaacagaaccccactaaatacatatgtgctgctcccctcttggagattgcaatctcagaaaagaggagtgagtcaggcaaagaaggaccaccgtttacaagaaaaggccacagcatggcatgaagcacaactgattgcttggtcttgcaacaccattgctatcctggtcactccaactaggtagaggagaagaatttattcatcggcatctctcactctttggtcagaggtttaccccgtggggcattagctcccttgcacttgtgcccaaaggcagatctttgccccaacaggaatgcacctaggcaaaagatgacaagtgtgacaggacacaaggcaagggattaccaggttggtccacacaaagcccactggaacccaggtagagctgcctgtcacactgaccactggagcagagcaagtagctaaagaccctcaggactcatgaggccagagaacctgaagtagtgcacaacaagtggctgacgcatataggcagtgaagaatcaagctggggtaaaaactctggcagccgggcctcaaagcccacacatttaaaatttctctgatatgctgccttgcagaataaggcctgaaccatttaccatgccctacaatgtcctgcatgatcgggcccctaccatctgtccaactccatcttgaaccttctttttctcactcacaaagcttcaggaacttgttcgttcagttcctaaactccgctccatcctttcctgccacaggaccttaatgcatgagtcctctgtgtggatgctttttcttcctcttttgcatggcaaacactttcttatcttttagtcacagtttaagtgttgccttctcagagagaacttcctgaccactctgtaaaagaggacttccccacttgtaattcttctcttccactccatgtgtgtttctttcacaatactgatcacagcttgaagtaattttattaatttctttgataacttcttttttgtttctgtctccaagagaatggaagcctatggaggcaaggacaatgtctatcttcctcaccattatagcctcagcatggagctcagtgcctgacccaaggagatgctcaatgaatagttgtaagatgaatgaatgaagtgttcttatatgagaaatagatttttttttttttgagacggagtctcgctctgttgcccaggctggagtgcaatggtgcaatctcggctcactgcaacctccaccttcctggttcaaacaattctcctgcctcagcctcctgagtagctggaactacaggcactggccatcacgtccggccaagttttgtatttttagtagggacggggtttcaccatgttggccaggctggtcttaaactcctgacctcaggtgatccacccgcctcggtctcccaaagtgctgggattacaggggtgaaccaccgcgcaaattttaaagtggtattgtccatatcagtgtttgaggtagaaacactgtggagttgctgaatggacaaatgaatgatgctaacgggtgaaggaagataacagactggaaagaaattagatgaatggcctggctctctcaagttttcttccagctctacaagtccttgaactatggaggatatctttaaggaagtgcaaaggaaacaggaaggaagcaaaagtaggaattccttaggaagttcagaagaggaaagctggagaatctggcccattgtatgacaaacaggaagttatttaaagcagggttttgaaactgtgaacctctaaatggcttacaaaaatccaagagcactcataaaattgtatacaaaacatgtctccatatctgcatgtgcaattttctaggcaatagtttctatcgtatttgaaaaggaacttataacttttacatagttaggaaacactgattgcagaaacagatgagtctacagataatctagacttacttcctcagttttcaaatgaagacatcaaggcccaaagatgttatggaacctgctaaattgcaaacacaatcaattaggtgacaagagggcacaagactcaggtctctcaattccccttctagtgttctttgctgtgccacaataccttcctgaaattcagttataaaatactgtgtgaagaaaaaaagaaatgtttaatatcttggaaaatagaagagaaaatctaaactgataacataggtaaatgcaatagaatctcaaggctaaaggagcctcaaaaggcccactgaacagttccctgacttcaggcaaaaatcctgtaaacatcctggaatgattatttttcaagatggttaaggaatatgaaagaaagagtcaaaataattattcagcacttaacttagaaacaaaatactagattatctttattcataaacataagcatgaatatagttgtctcttggtatctgtgggggattggttccagggcacccactgataccaaaatccacacatgctcaagtcccttaaataaaataaaatggcatagtacctgcatacaacctccacacatcctcttgtttactttaaatcatctctagattctttataatgcctaatacaaagtctacacatcacttcatttgcatggattcaatgtagtacttggcatacagcaaattcaagtttgctttttgaaactttgtggaatatatttttccaaatattttcaatttcttggttggctgaatccacagaagcagaacccactcatatggagggccgactgtatatatcaaagttgctcacaagaaagaatttaaaaataaaggcataaactgacaacctatcaaaatccaatgctcaattatgatgcaaaatgaaaacagaaacatggtatgttttttaataactgccgagataacaaagtatggtgaacatttgattatctctcccaatgtgagtttaaggacaaattaagtaaattaattgcacaatctatagtccttaacttaggcaattagtcaacttttgttcagagaacatcagactgttaggatacctgagttaaatttcttgcaaccaccactaatttctgggcttggacaagtcactttctctagttctcagtttcctccatcttcacagtggaaaaaggttaatcttggacaagggttttcaaacttgttttgtcttttctgttttttttaaattcgattttttgttgttgttgttaccacccacacagtaagacatatatttcctgttatctgcatccataaacatatatgcccataactgaaataaaagtttcgcaagacagtattgatgctcagtatattcagtgcactctcatattttctattctatgagattatgtcctgttttttaaaaaatgtaggttattactcatcacattgatttaataacctatgcatgggtcacaatctacaggttaaaaaacatgaatatcacttgtagttttcatattctaccaataaactctctgcaagaaccacaagtcaatagtacaatttacctgaatttctattttctcccttcctatgccagaggtgataatgggcggtgacaaagaattacaagtagagaaagggtaaataagtgctttgagcatccatcaaaggaaattctgccagtaagtaatttaacattaaccagagagaatgacaggacatccacaactggaaacacaggacatccagagttggaaagttttcactgactttttttttttaacctgcctatgaactgttcgagttttgagagtttcccaagaaaatgtttgagagaaggtggggatggaaagaaggagagggaagggggagaaaaggaaaggaggaaaaacaggtgaatgttcaagtgttggtgggtagtgttgaccccctacactagcgcaagcctcagtccatgcaaaaaccccctctacacatgtgagacaggaccttctgggccgtgtcagcaccctgcactgccagaacacttcctataaatcaaaacctgactgttatatgtctactaaagattcttcagtgccttctcagcctctatagggtaaagtgcaaactcttcagcacggcacaccaaccattcgtgatctggtggcatttttcccttttccccaaaaccatccacaaccacaatggtacacacactgtcactagttgcatagagtccttaaagttctccaaacaccccttcccatgctgctttgattttgtttccactcttctctcaacagcttaatagaagcatattctttacttcctagcgatgtacttgtacttcctgttaagacagcacatctaaaatgacttcagttcccaaaagctctggaatcatgttttgttttttctgcttattttggggtttcattgggctctcctctattcattttcttttcttttcttttcttttttttttagacggagtctcgctctgtctcccaggctggagtgcagtggtgcgatctcggctcactgcaacctctgcctcactgcaacctctgcctcccaggttcaagaataccctccgctctgcctccctcttctagtccttcaattcgcagcacatgtatcccttttctttcattcccacctggtccatggtcttccaacgctgtgctcacccaaatcacagatgttgatgccaagtattgcaacacatcgcatctgctcatcttccccacttgaccctgagttggacacaggatggtgtccatcctgttcaaggtgagccgtgtccaacacactgtaggaatgccatggaatcccataagtatttgttagctgagtattgaaggactctcctatattctacctgtcctagctgctgtcctagctacctatgcctggaagctctgaacctcagctatgacggttggcagtcaagtgtgatcagattaagcagataatctctagtcttctgacaaaactttagcaaaaacttcacataaaaagtaaagtatgattctttacccattaaaaaaaaatgataatgattaagcggaatgggaacattggcagccaatcaagagaatgttatcttcctaaatggcccttccaaaacaacttgaaattaaaagtgaaaaaaaaaaaaactcagaaaacagaaaaccacagtgaagggtgaacagattttaagaaatttcatctttggactatatcccttttattagtggaaaacagaggtaaatgtggctaattgtaaaaatcatctgtgtgaaggaaggcaaagcacctctaaaactcaaagatacattcctaccttgattagtaaaagagtacaatttcactcaaacaataaatcactggtgtgaggagcaagtcacatgggctcatatagttcatttttttaatattagaaataaaacaagaaacggttaattaaatctaacaagggataatgataagaggacgaaagataatgaatgttatcccaaagaaaggaaaaaatgaaatattgcattttagaaaatgaacacaggctgggtgcggtggttcacacctgtaatcccaacattttgggaggctgaggcaggtggatcacctgaggtccgcagtttgagaccatcttggccaacatggtgaaaccccgtctctatcaaaaaaatacaaaaattacccaggcgtggtgtgcacacctgtaggcccagctgctcaggaggctgaggtgggagaatcacttgagaagactagagattatctacttgaacccgggaagcagaggtttcagtgagccgagatggcactactgcattccagcctgggagacaaagtgagactccatcaaaaaaaagaaatgaacagaggtgagcgcaatggaaccccaaaataaggagaaaaaacaaaacatgattccagagcctttgggaattgaagtcattttagatctgctgtcttaacaggaaatacaagtggacagctaggaagtaaagaatatgcttctattaaactgttgataaaaagcagatgacagaatataaagaactagggacatggtttaaatctccttgtctctatgacatacaggatatctcaattagataatgatttcttttcatttcctgaagaacaaaggggctgaataaagtaaatgtatttgttggttatcggaaagaataaagaagcctgcttccaaatgcatttcccagtgaatccgattccggtccttggtaaactctttgaagaaaatgtctatgagcacatgaagaaatgcaaccagtaaaataacatgaattcttgagagcaattcaagataatgatgggattacattttcttcattgccgggattttgtcctaaaaattattgatggttatatattggtggagaaactgtaagtgatttttacaagttttatgcttatgtttgtatcatcaaaagtttctacaatgaacatgtattactattggaataaaaaaaatccccttcctctcctcttctaccaaaaagaaaaattctgataggacaacatctaaaactttggtttatttgatcttttgtggcagaaatttgaaaaatgtgatcctgtcattcaaatgactaccaagatgatctctgagaaattaggctattcggaagagcatcaaatccaggctcttaaaagtggaaatcggaggacatagttccagggatagcaggggctttcataaccccttccgcctgggcagaggtgaactttgtggtagtgttgctattatttgacagtaagtaagcaagcatggttaggagatttttattttagtgacttagtcatcaccaagttcttgatcaaaaaaacagaaactaaatcagctggctcagagtttttgaaagcaagtttatttttaaggacaccagaaccatgaaaacatgattcagtccagcctgtgggagctgcagatgggaactggtgagctgttgggttggggtccacgcttcataagtcctggcagattcatggcctctttcctttgctcttttcttaatatctgccccattctcatctcagcagaccagatcccttcacttattcaaaatttctgctctcttgtgattttgccctgcacgtggcttttactaggccataaaactgcccccaggcatgatgctacatgacagataggcttctggcagctagcacaaactttcagagagccagttccacattgaaaagaaaagatgttgattgtctcagcgtgggtgaggtgtacatccctgtgtagatctgccatggcagagagactaggatacattttatcaatgaccactttggctcagcccttcaacaaaggtttactggggctaagttccagagaaggggactttgtgccaagtatccaaaatatatttattacctttgaataagcatctttggatgaatctgcactcctcctccctgtgcacagtctcattcctacagcagcctgccccttcctggctgaaacagaaagcagctaactcatactaaagtacttatgaacaaccaagtgactttagagcaaataattcatcttctcagggattgactacatttaattttctctaaaaagacagaattttgattgttatttagtactaccttctagtatagaaaatgttttctactataactttgtaaccgccaaaaccaaaggttgaagatcacctctccagggctatttgcatttttaaagcgaattctaaataataatgatagttaacattaattcagtgtttattatatgtcagacactcttctaagaacttaacacataataatttctttaattcttacaacaacccaagcaacagagtgtgttaattaggataatataaactgtggtaacaaataaatactgaaaatatataccttaaacaaaatcaaagtttacttcttgcttacatcacaggccaggatgggtgttcctccatctgggtccgtgggtggctttcctccatttggagattcaggaatcgaagttttttttgtttttcctgtgactctgccatctcctaaacctcactttcacctgatgtcagccagggaaggaaaacgaaagtgtggagaagttacccacatcttaaagagcctggcctagaagtaacacacttcaagtccactctgttagtgagaactagtctccgggcaccagctggatgcaagggagtgagaaatgtactctctgatgggcagccagttctcagaaaaattagttttttatcaatctggatttgcacattcttttcacattttaacatctcttcaataggaatgtattgttcaatcaatggcaagtttattattcaaggtaaactcagatttggttggcagcatttttcctttttggtagtacatacacagcgtgtgctttacaatcaatggaatcttaggctagatgaaatttggtttataatacggaagagggaggagaaattttgcctcttcctcatttagctgttcttttcaccaagtatctgtatatacacccttctttcctcattctaaggacactgcaagatggagaacatgctaaattcttatccagttcatgcatacagctcaaagaccagcatctctgggtgatatgaagtcttctcatctaaagctcttttcactttggtgatacacaaacatataaaaaaaattccctgcccctctaatatgtaatgataagacagggacaagataaccacaatagaagctcctattaagaaagggaagaattgtggatacatagcagtcattggtccattgtagaaatggatactgtcttttaggttatcataaatatggtttttaaaatgttttgccaaggccaggtgcggtggctcatgcctgtaatcccagcactttgggaggccgaggtgggcagatcacgaggtcaggagttcaagaccagcctggccaacatgacaaaaccctgtctctactaaaaatacaaaaattagctgggcgtggtagcaggcacctgtaatctcagctacttgggaggctgaggcaggagaattgcttgaacccgggaggcagaggttgcagtgagccgagattgtgccactgcactccagtcctgggtctccatctttccagcacccaacaccagttttttgttgttgttgttgttgttgtttgtttgtttgtttgttttggggggtggaggggttgctacctgctacccaagtgttcagagagtaatagttactttaggtatttattatagcagtacttttttcaaggtatcaatttttttattaattagggtaatgttagaggcagtagataatagaccccaaaatttatggctcaaacttaatagatgtttatttctcattattttaaccacccaaagcatatgtcccattggtggtcatctttcctccatagtgtgattcaagtatctagtcttcttccatcttgtggctcagtcttcccctagagcaacatctgcaaatgaatctagctggtggaaggagaaagataatggagaaaatataccttcttcttaaatcttgacctgaacatgccacacctcacttctgctcatattccacagattagaaggaaggaaggaaggccacatcaggtccatgaggagacaaactccttgtctgagcagtttccagtgacaagtccattctctaaaggggaagcacaaattctggcagacagctagctgtttctgatttaaaaggataaggattgaatcttgaattacagaaatttagtggtgggggaaaattttttttaatagcattaagtagttcctcatagggtacctcagatcataacatatcagtaaccaccaactctgtctcctaagtctgtgcctgtgtactattttgaaatattagattaaatatatatgacaaaaaatagaacaaaaaacaagaataggtgacaatgttttaaaagtagccagcattggtagtagtaatcatatagtagaagtagctggcattatttttagtgatttctatataccaggcactgtattgagtacgttttaagcatgattttatttaaaccttattagcatccccatgagatgaggaaatttagaggtaaaataacctgctgggttaaataacgtctaaaaatatctcatttcagggcctggttcctaaccattgtagaggaggaaaatagtttttcttctaccttcttaggttttctaactggggccctggaagttaaaccaacaaaaggtggactaacaagagaaaaacagtttcatacatacctatgcatggtacgttcacagataaatgagactcaaggaggcagccagatgattgaggcttatgtatcatcacaggctaagcaaaggaaaaaaggatttggggctttggggtgagggaggcaagtattaggaaggtgaggggaggaaataattagagttgtgttgttaagcaggtaagagtctctcaagtgctgagtgctgtctccaagagcagccctctcccttttcaaatgaaaatttcctttacaaaaggggaaatgtatactctactttcaggcagtcacagggagacaggagcttttcctgcatcggatagttttcaattggctttaactcaaaataatctatatgacaaagaggcatattttgaggtggcatattcatataccctgcatcataccccaatcatttcttcaacttaatattcagcaatccctgggatttcttgaagaaaatacttgagaagtactgaactaggagttaacgatgatagtgtaggtgaatagttggcaacactttagtcataaacagaaattcaaatgaattacctgaaactgcacattagtccttggttaagagattataaaatgactcagaccttgcttttaaaaaaatcatatatttctggccaggtgtagtggctcatgcctgtaatcccagcactttgggaggccaaggtgggcggatcacaaggtcaggagctcgagaccagcctggccaacatagtgaaaccccgtctctactaaaaaaatacaaaaattcaccaggcatggtggcgcatgcctgcagtcccacctactcaggaggctgaggcaggagaatcacttgaacccaggaggcggaggttgcagtgagtcgagatcgtgccactgcactccagcctgggtgacagagtgagaccccatctcaaaaaaaaaaaaaaaaaatcatatatttctatataatcatgaaaattaagaaatcgaagattcttgtagagaacttatagtttgagagatgtctcccaattctataaatgtgtgaatccctaattttatcagtaatacttcctgctacctcagagaaatgctaacttgttgggagagtttttctctccttaatattattgatccttgactttcaaaccttatgctctttctaattttttttttttttttttttttttaacaggatctcactctgtcacccaggctggagggcagtgatgtaaacatagctcaaactcctggacttaagtggtcctcctgcctcagcatcccgagtagctgggactacaggtatacaccactacacctggctaatttttaaatttttgtagagacagggtcttgctttgttgcccaggctggtctcaaactcctgggctcaagcaatcctcccactttggcctcccaaagtgctgggattacaggcatgagccactgcacctggcctctctttctaatcttcagggtcatttagaaacttatagtcaattccactgaaacactgaaaggtaaagattctcaaggtccatgtatagggaggaaatgatgggccctattcatgagtgaccaagggtgataaaagagagaacataagccggtcagtttaactagaaaaaatttgacagctcttagaagagagaagatggaggccgggcacggtggctcacgcctgtaatcccagcactttgggaggctgaggcgggcggatcacctgaggtcaggagttcgagaccagcctggccaacatggtgaaaccctgcctctactaaaaatacataaattagctgggcatggtggcaggtgcctgtaatcccagctactcgggaggctgaggcaagagaatcgcttgaacccaggaggcggaggttgcagtgagccaacatcacgccattgcactccagcccgggtacaagagtgagacttcatcgcaaaaaaaaaaaaaaaaagggagagaaagagaggatcaagtccccagatggagaggaactcagacagcagggtccaggcccaaggaagactacattgtaggaaatgaccaaaggaactcctttgggggaaatttctaaggaaggtgtcactaaatgggatatgacagaagttaataactatccttcggctttcgtgttattgtcaggtacttcctctatttttttactgtttatcattcattcctttccctgggcttctgagcctcaagtgttttttcactgttgcatttcctcctacttggaccagcttatttattatttgtttgtttgagatggagtctagctctgtcacccaggctggagtgcagtggctcaatctcagctcactgcaacctccgccttccaagttcaagcaattctcctgcctcagccttccgagtagctgggattacaggcatgcaccaccacactcagctaatttttgtattattagtggagacagggtttcaccatattggcaaggctggtctcgaactcctggcctcaagtgatccttctgcctcagcctcccaaagtgctgggattacaggcgtgagtcaccacgcccagcctacttagactagtttataaattaacattatacaaaatatatgaaaggactacaaatgtgcatccagacaaaggaacagaggagtgtgtgtcactctgcaaggaggctgcttattccaggacctgcctgcaccccagagtcagccatccaaggagatcacacacactctgcagacactggtgataagggtctgggagcaacacactaggttactttatgtcagaggcaaagggaaaagaaattgcactttcttctcataacaaactccagagtgctcacttgggagactgacagcccaacaaatacaagtgacaaggaagcaatttcaggaatgtaataagggagaactagctaggtttaaaatgtattgctaaagagttatgcaatttttgacttgtaagaaacttaaagaccccatctcatctaaaggtcacaaacagcagccttggagccaaatctggcccacagatgtgatgtgttttgtttggtgcatagtttgaattagttgtcagcatttaaaaaagaacagttcacattttttaaaagtccagattcctgattactgctgggaaaccagaaaatctgtggatcctacattgccagcatttcccggtggcagtacgaaaagccgagcagtgatcgtgccctttggacgttgctcgagtctgcagtttcccacagtccctggctggcctcctttaattcatttacataatctgtctggactctattggcagcttttgagtttaaagcccttgctaagccaacctgttcatttttatagataagaaagcgaggccctgagaagccaagtgactcacccaaccatacgcctatgttggtgtcgtttccatacattcctttttccatcccatgctttctcacttacacggtgaggtttatttagcaaaattttgaaaagagatttggaaagcaaacataaatggtgaggttaaagtctgaagaaactatgttgaaagccggaaaacacaaaggtgatgttaaaaagaggataatttagaggctcgctaactggaactcaagagacttccaataggaaattgttaatgagaggaagtggaaggaagagagaggttacaggcataataagaacaaatgagagaagcgtgagctaaggtaagatgatgagagagagtaaaacaggcactgttttacttgatctgctcccatacagaacaaaagcagcagttgacagaaaggaaactgacaaaataaatttcaaaataaaaactgatcagaaaaaaattagcaattataggccgggcatggtggttcacatctgtaatcccagcactttgggaggccaaggcgggcaaatcacgaggtcaggagtttgagaccatcctggccaacatggtgaaaccccgtctctactaaaaatacaaaaaattagctgggcgtggtggtgggcacctgtaatcccagccactcgggaggctgaggcaggagaattgcttgaacccgggaggcggaggttgcagtgagccaagattgcgccactgcactccagcccgggcaacaatgtgagactccatctcaaaaaaaaaagtataaaagatgtcttgttcagatctatttatttggggaaaaaagacatgaagaaaaggagaggcagcttctcaagattgcctgagatgttattaacaacaacaacaacaaaaaatgtaaacaaaaaacaatttcaaaggagagcctcaccaaaaaaagagaataataattttaaaaatggggataaaaaataattatctcaaaaaaatctccacaagaaaaaaaataaaattcttcctgaaactgaagcatactagaatatgcaaccccaaaatatgtcactttggcacacaggttatttggagctaaaggcactagagaaccagcagaccaagtaaaagctctttacttccccctaatcacctaacatgaactataacgtcccccttttgtacagaaaatttacatttataaaggaaatttccatttgtaagggaagagagctgctcctggagacagtagttatcacccgagagactcttatctgcataacaatacaaccgttatttactatacatttcttcccctcaccttcctagaactttcctcctcccttcagcagcccaaaaccccttttcctctgctcagcctaagatggtacagaagcttaaatcatctggctgccactttgagtcttagttctttgtggaaacttccctgcataggtatgtaatttagccgtccttctcttgttagtttgtcttttgtcagtttaatctccaaggccccagtcagcgaacctaggaaagaagagggaagtagtcctcctcaccaagagttttggcaaccattaagggacagcaaggacatctcacttgctcaggaggctaaagttgagatccaggatctctgacaaagtcggcaaaaggcaaaagttcttactaaagtcaccctcctgtatttctgtctgtagagtctgactgaaggaggatagtagaagtctctttgtcttttcctttccaaatttgcattagcaagagaaaaatatttgtaaaatttagttctttggatggtgactcttgtaaatttggtttttttcatgtgcgtccatgtgaagagaccaccaaacaggctttgtgtgagcaacatggctgtttatttcatctgggtgcaggcgggctgcgtccgaaaagagagtcagcaaaggtggtggattatcattagttcttataggttttgggataggcggtgaagttaagagcaatgttttgcgggcagagggtggatctcacaaagtacattctcaagggtatggagaattacaaagtaccttcttaagggtcggggagattacaaagtacattgatcagttagggtggggaagaaacaaatcacaatggtggaatgtcatcagttaaggctatttttacttcttttgtggatcttcagttacttcaggccatctggatgtatacatgcaagtgacaggggatgcgatggcttggcttgggctcagaggcctgacattcctgctttcttatattaataagaaaaataaaatactgttgaagtcttggggtggcgaaaatttttggggggtggtatggagagataatgggcgatgtttctcagggctgcttcgagtgggattggggtggcgtgggaacctagagtgggagagattaagctgaaggaagattttgtggtaaggggtgatattgtggggttgttagaagaaacatttgtcatgtagaattattggtgatggactggatacggttttgtatgaattgaaaaactaaatggaaaagtctaagaattgggaggacctaggacatctgattagagagtgcctaaggagattcagcatagtcctgccagtaaagattatttatttacttcaagagttaagagtggcagtttggggatagcaccaggagatatcagctgtgatggctcggagaaacagtgtaaaccggcagtgtaaacaagagcagggcatgtatgagtagttgagaacggagaataggagtatgactagacagaaaatagtagggatgacaagttttttggggcacagtctaagttggtccagtgtctggaatgagactggggcctaacaaaaaggagctcaaatgggctgtaccttgtagcattccgaggacaggcctgaattctgagaagcaaaagtggtaaaagtattgtcctttttaatttggtggctgagcttggtgaggtgtgtttttaaaagacctttagtccgttctacttttcttaaagatggaggaccataagggatataaaggtttcctgaatactaagagcctgaaaaactgcttggctgatttgactaataaaggctggtctgttatcagactgtatagaggtgggaaggctaaactgaggaattatgtctgacagaagggaagaaatgactgcggtggccttctcagaccctgtaggaaaggcctctacttatctagtgaaagtgtctacttagactaagaggcattttagttatctgacttggggcatgttgagtaaagctaatttgccagtcctgggtgggggcaaatcttcaagcttgatgtgtagggaagggagggggcctgaataatccctgaggagtagtagaatagcagatggaacactgagaagttatttccttgaggatagatttccacaatggaaaggaaatgagaggttctaagaggcgggctagtggcttgtactatagcatagcctgcctttgctggtgtgtggcgattaggcctggtggaactgccatcaataaatcaagcgtgatcagggtgaggaacaggaaagaaggaaatatggggaaatgcggtgaatgtcaggtggatcagagagatacagtcatgggggtcaggtgtggtatcaggaataatgtgggaggccagattgaagtccgggccaggaagaatggtaattgtgggacttaacaaagagtgagtacagctgaaggagccagggagcagaaagtatatgcatcaggtatgaggaagaaaatagattttggaagttacgagaaatgtggagagtaagttgagcatcgtttgtgattttgagggcctctaaaagtattagggcggcagcagccactgcacggagacatgacggctaggctaaaacagtaaggtcaagttgtttggacagaaaggctacagggtgcggtcctggctcttgtgtaagaattctgaccgcactaactatgcctaggaaggaaaggagttgttgttttgtaagggattgaggtttgggagattaatcgaacatgatcagctgggagagcacgtgtgtttttatgagcattatgctgagataggtaacagatgaggaagaaatttgggcttgactgaagtaatgggggctgtctgtgaagccttgcggcagtacagcccaggtaatttgctgagcctaatgggtgtcagggtcagtccaggtgacatcgaagagaggctgggattaagggtgcaaaggaatagtaaagaaagcatgtttgagatccagaacagaataagggattgtggagggaggtattgaggataggagagtatatgggtttggcaccatggggtggataggcaaaacaatttggttgataagatgcagatcctgaactaacttgtaaggcttgtctggttttaggacaggtaaaatgggggaattgtaagaagagtttataggatttaaaaggccacgctgtagcaggcgagtgacaacaggctttaatccttttaaagcgtgctgtgggacgggatcttggcattgagcggagtaagggtgattaggttttaatgagatggtaaggggtgcatgatcggtcgccaaggagggagtagaggtatcttatacttgtgggttaaggtggggagatacaagaggaggacgcaaaggaggctttggattgggaagaagggcggcaatgagatgtagctgtaatccaggaatagtcagggaaacagataatttagttaaagtgtctcggcctaataagggaactgggcaggtggggataactaaaaggagtgcttaaaagagtattgtctaagttggcaccagagttggggagttttagtttagaagcctggctgtcaatacgcacaacacttatggaggcaagggcaacaggcccttgaaaagaaggtaatgtggagtgggtagcctccgtattgattaagaaggggacggacttaccctccactgtgagagttacctaaggctcggcgtccgtgatggtctacggggcttccaaggctatcaggcagcgtcagtcttcagccgctaagccgagaaggagtcagtcagagagccttcggccagagttccaggggctctgggagtggctgccaggtgagttgaacagtctgatttccagtggggtcccgcacagatgggacatggcttaggaggaatcctgggctgcaggcattccttggcctggtggtcagatttctggcacttgtagcaagctcctgggggaggaggttctggtggaatgccgggctgctgcggttcaggcgtttggaagttcttatgtgctggagatgtggctggggtttgtctcacagtggaggcaaggaattgcaacttttttctattattgtacaccttgaaggcgaggttaattaaatcctgttgtggggtttgagggccggaatttaatttttggagttttatttaatgtcgggagcagattgggtaataaaatgtatattgagaataagacggccttttgaccttttagggtctagggctgtaaagtgtctcagggttgctgccgaacgagccatgaactgggctggatttttatatttgatgaaaaagagcctaaacgctatctgatttgggataaagaaaaaggagcattaaccttgactatgcctttagctccagccacctttttaagagtaaattgctgggcaggagggggagggctagtcatggaacgaaactgtaagccggaccgggtgtgaggaggggaggtgataaaaggattatagggtggaggagcagaggctgagcaagaattgggacctagctcagcctggtgaggagcagcctggggagaagggaagaggtcagatgggtctgtagaaaaggaaaattagaaagactcagcgacgcttggggttgggactgaggggacaggtgggagggaaagaaggaagatttgtgatgagttgcattgggaacagagactggaaagggaccgatgtgtaaaagagtgcctggacgtcaggcatctcagaccatttgcctattttacgacaagaattatttagatcttgcaggatggaaaaattgaaagtgtcgttttctggctatttggaactactgtcgactttgtattggggtcaagcggcattgcagaagaaaataagacacttagattttaggtcaggtgagagttgaagaggttttaagttcttaagaacacaggctaagggagaataaggagaaattgagggtggaaggttgcccatagtgaagcccagagaaaagagagagtagagacatggagggaaggggttcgggggttcttaccctccagaaaagcgggaaaggggtcagggcacagagatacgaggtcggggtgcggacataagggattggggcgcagagatatgaggttggggtgcggaaataagggatcggggcacagagatataaggggttggggtacttgccccttccccagaaaagcgggacttgccgctaagggtgaaggaccaaggcaggcgtccctgcgtggtctgacacctgaataatcagaaaggcatcccagcaatgattaaacaccaagggaaggctgccttccctattccgtgactggtgccggagttttgggtccacggataaaacgtgtctcctttgtctctaccagaaaacaaaaggaattgaaattaagagaagggagagattgaagagtggaaaggagaaagtggttgagggtttagtgagagaggttggagaagagagtaagaagaggccgcttacccgatttaaaattggtgagatgttccttgggctggttggtctgaggacctgaggtcataggtggatctttctcatggagcaaagaacaggaggacaggggattgatctcccaagggaggtcccccgatctgagttacggcaccaaatttcatgtgcgtccgtgtgaagagaccaccaaacaggctttgtgtgagcaacatggctgtttatttcacctgggtgcaggcgggctgagtcccaaaagagtcagcaaagtgtggtggattatcattagttcttataggttttgggataggcggtgaagttaagagcagtgttttgcgggcagagggtggatctcacaaagtacattctcaagggtggggagaattacaaagtaccttcttaagggtcagggagattacaaagtaccttcttaagggtgggggagattacaaagtacattgatcagttagagtggggaagaaacaaatcacaatggtggaatgtcatcatttaaggctatttgtacttttgtggatcttcagttacttcaggccatctggatgtatacatgcaagtgacaggggatgcgatggcttggcttgggctcagaggcctgacagttttgagtactcattggttactgatctctagcttcctaagaatagtcattgttttcctttgtttctgtcctttgtgtgatttattataatgaggagaatagtcatagttttggagaattgtcatagttataggcataggccctataagcctgctgtttaagccagcttcacagacccttgagtttacagtttatgctagagcagcatccatttagacaaactttgctgcggacaaccaatgggaaaaaactggatgagattcttcttttatctcattttgtgttctgagagtttagctttgtgactactatggtctctggtaatcagtctggtttctgccagctgagatggcaaggttgtcacacttgaattgggcagctagccaaccagctaggaacccaaagcacaaaatgcacaagcagcattttctttgaccaaatcttgcagctgtcaggagagtttgccttaataaggcaccccagtccattggggcctttattgtcattctttgttgccttgtttgtgctgggaaaagtaccatcccagtattacctacctgatatcacagattagtgagtctgtgattgaaggcatctcacttttatgggagactgtagtttccttattgactgcgacaatgaatttctttgcttttcaggctatctttgggagtaactctgaatcttggggaggaggagtgggtactgcctcctttgaaccctctttgggaaggtctcttatgtctatggttaagctgtaaaaaagctgattggtttagagtcacattggactaggtatacctttgaaaatttggactttatatccaaagggatttttttaagagagcttgcaccctaaaacaaatgtcctactggtactgataggaaaatcagattgcaagaaagacaaaaaaaattttaataactatttggaaacaaactagacaaaaatcttaaaagtcttgtgtattatttcattctcacattggtataaagaaatatccaagactgggccgggcgcggtggctcatgcctgtaatcccagcactttgggaggctgaggcgggcagatcacgaggtcaggaaatcgagaccatggtgaaaccccgtctctactaaaaatacaaaaaaaatggccaggcaccctagctcacacctgtaatcccagcactttgggaggccgaggcgggcggatcacaaggtcaggagatcgagaccatcctggtctaactcggtgaaaccccatctctactaaaaatacaaaaaattagccaggcgtggtggtgggcacctgtggtcccagctactcgggaggctgagacaggacaatggcgtgaacccgggaggtgaggctcacagtgagccgagatcatgccactgcactctggcatgggtgacagagcgagactccatctcaaaaaaaaaaaagaaaaaaaagaaatatccaagactggataatttagaaagaaagaaggcttaattggctcatggttctgtaggctgtacaggaagcgtagctgtttctgcttctagggaggcctcagggagcttacagtcatggcagaaggtgaaggggaagcaggcaggtcttacatggtcagaacaggaggaagatggtggggagatgtgtgctatacacttttagaaaagccagatctcataactcacttactcactatcataagaacagcatggaggggatggtactaaaccatttatgaggaatccgcccatgatcccatcacttcccaccaggccctactgctgacacttgggttaatagctgaacatgagatttggtggggacacaggtccaaccatatcatcttctctacaaatactggtgaaagattatagccattatttagaagtttaccttaacttgttccatctgccaagaacacaaagtggatccaaatattttacataaactagtgagttttgtaatatgatgcctgactcatggttaaaagtttaaaatgaaagctatgagatttctattggcatctgtgtgcttacatatgcttatgtgtgtattttgcatattgatcgttttctacctccggatggtattgccaaaatttatcaaagagctctgcattaattggcttagaaaacaataactgctcatatacattaagtattattaaaatcctcagaaaaaatagaaattaacccaaaatttgttttcaaattcacatgctctgggctaatctttggtaaataacactagttcagtattgttagttaaatacaaataggtatttctctagatttgtcagcattcaatataatgtagacatgcaattttattctacttgagtttactagccaaataagctgatgttatctctatttgatgttttggattataaaattataattcaaccaaagaatcaaatgtacaataaaaatgaattgcttgatgtatgtcaaagatggcagttaagaagaaagacagagagcgagagcaatataattaacttttaggttctttacttctgtgatttttgatagctacctcacatgcctgtcacaaatttgttaacaagaaaataaactttagatgatgattagctttatttaatcttgcatgaaattttcatcaataatccaaacataattgttaggaacaagttaattaaatagatgtaagtgggataaaactctatagctgaactttcaacaatagttatgttttataatatgtctgcttaaatatagtatctaaaatctttctggtaacctaaaacctcaaagatatagaaagtttagttaaatgagagatagtcatcaaatatttgatcatttctatatatgatataatactgaaaatttaattaagtttatctatatttggcttcttattacagagagactaaataatatttaagtctgttagtcaacatattcttcttgccacactgaaaaagtgtactatgaggaaacacatgcctctagaaattgtgaaagggtgtattcataaatatgctaatctacagaatgcccctatatataacagttcacaatttcctacttccttgttttcactggaaattaaggtattaatcattgaaaactctaatcaatatacataaatgaactattaggaataataagggtgaaggagaaaagtctacatgcaaagtatacaaagaaactaagatgtgttgggcacagggaggggaacatcacacaccagggcctgtgagggggtcgcgggcaaggggagggaaagcgttaggacaaatacctagttcatgcaaggtttaaaacccagatgacaggttgataggtgcagcaaaccaccatggcacatgtatacctagataacaaacctgcacgttctgcacatgtatcccagaacttaaagtaaaataaatttaaaaaaagtaagatgtgttttgacaaggaaatatatgaagtatgaaggatgcatttttgttaaggaaaagggagagtaattttgtcctacagtagtttaatgttatttaaagattatttcagagtgagaaagaggaaaataaaggacaaaaactaggcaggtataggaaattgtcaaaggagagagagagaattttgtgtagtcaaatatctaaaatgggctgggcacagtggctcaggcctgtgatcccagcactttaggaggccaagacaggacgatcactttagactgggagtttgagaccagcctacacaacacagagagacctgagaccctgtaaattagccagacgtgctggcatgtccctctagtcccagctactctggaggtaggaggatcacttgagcccaggagtttgaggctgcagtgagctatgatcgtgccactgcactccagcctgggcaacagagtgagaacttgtctctaaaaaaaaaaataataaaaaataataaaattattataaataataaaattaaatggatttattaaaatgtttaaaaataaactctaatatcaatagtgtgctgatgcagaactggaatttggattgttgatttgttcctaataagagatcataaaagggtttctttatctgttgagtactttgcataggaaacaaagattctgtgacttaccagaaataatttcccacatgtagtcccagctacttgggaggttgaggcaggaggaacccaggagtttaaggctgcagcgagctatgatcacagcactgcacactagcatgggtgacagagcaagaccccaaatctttttaaaaatttaataatttcttatgcttaatgttgtctttaccatatctttgattacttttttaaaaaagagtcttctcactatggaaaaagctaaggttttgttttggttttggttttttacaattatgtgaccttctgtatttacctttacagtaatattttccctttgattaaatagataactaagtattgtttcatagttacctgttatcctgttttatcaagggttcaaaccttttgcaatttttgatagtcttccccaaatcaaattctaaagtcttttaaaattttttttgttaaattttattttttaaaatttttatttatttatttatttatttatttgagacagagtgtcactctttttgcccaggctggagtgcactggcacaatctcggctcactgcgacctccgtctcctgggttcaagcgattctcctgcctcagtctcccgagtaaccgggattacaggcacccaccccgcccagctaatttttttgtatttttagtagagatggggtttcaccatgtttggccaggctggtcttgaactgacctcaggtgatccacccacctcggcctcccaaagtgctgggcttacaggcatgagcaaccgcacctggcccttcctcgtttttttgtttgtttgtttgtttttggtagagatggggtctctctgtgttgctcaggttggtcttgaactcctggccttgagtgatcctcccaccctggagcaaagagctgggatcacaggcgcatgagccactgtgcccagcctgattctgtagttttgttttttttttacttttgttgttgttgtctgtttgttttttgagacaaggtctcactctgtcactcaggctagagtgcagtggcgcagtcttggctcagtgcagccataacctcccagatgcaagtgatcctcccagcgcaggctcccaactagctggaactacagacatgcaccaccacgtctggctaatttttgtatttttggtagagatggggtttcaccgtgttacccaggctggtctcaaactcctgagctaaagtgatctacctgcctcggcctcccaaagtgttggggttaccggcatgagccactgcgctggccctagtctttttcactttgaactaactttgacattccacagaactctccttgaaaatctcaaaggatttgctctttcacattgaaaaaaagagatgttacactaattagatttatttgatacgctaaattacatgagaatcatcgtcaactaaaatatgatgcttaaccttctttatgttatatttgtataggtacgtaattaatatgtgtttcaaaactgtataaagttcctagatatttatcaatctttgctgttcatatgtcctgatacagtgttatctggacagttactattataaaatgctgtaagccacagaaataaccaaatttccttgttaattgcactataatgaactctcatcagatctttaatcatggttatttgtaagtcttttgccattcacagccaattattgttttatgataattcttctctgaatgcttttgcaatcaacaagtgaaaatgcttcatcttcccagagaccatggaaaagactcagagaggtattctcaagtatttaagattataccactggattgggtaaagatttccaaaacactaaagaagaaacatgaattcataaagctgcaaatacagcatcaagcaaaacaagaattaattccatgggactgaatgaactgataagaataattctaatgtgtatggcccttttgtttgaaacattactggttccttaatgtttttccatatttaagaaaccctttttctctgttttcttaagctatctataacttacagtaacttggtaaagtatacctttgtgaacaaagatgaaaagataaaacatttactttttttgagacagggtctcactctatcatctgggctggagtgcagtggtgcgatcacagctcactgcttccttgaactcctgggctcaagcaatcccccaacctcagcttcccaagtagctgggactataaatgtgcatcaccatgcccagctattttttttttttttaagagatgagagtttcactgtgttgcccaggctgaagtgatcctccagtgaagtgatcctccagtttcagcctcccaaagtgctgggattacagatgtgagccaccatgccccgccagaaacattcactttttctccccacccgatccttccagaattcggaaatctttattgaatattcttattttcatggtgatgtatttacatatgttcagtaagaatctcttgtccttataacagaatgcaatttgaaatattacttatattagcaaggctttcactggaatatcatattttaggatgatgcacataaaatcagataacatcagacagttttaaggaactgtcagaagcacttgaacaagagcaactccatcttgaataggggctgagtaaaatgaggctgagacctactgggctgcattctcagatggttaggcattctaagtcacagaatgagataggaggtcggcacaagacacaggtcataaagaccttcctgataaaaacaagttgcagtaaagaagccggccaaaactcaccaaaaccaagatggtgatgagagtggcctctgggtgtcctcactgctacactcccaccagcaccatgacagtttacagatgccatggcaacgtcaggaagttacactgtatggtctgtaaaggggaggcatgaataacccatcccttgttgagcatatcatcaagaaataaccagcagtgctggcgctgatctgtctatggagtagccattctttcattcctttactttcttaataaacttactttcactgtaatctatgaactcgccccaaattctttcttgcttgagatctatgaacccattctgggggtctagatcaggacccctttctggtaacaaaactaatgctgactttatgaagccagtgcttaaaaagccccttgaaatattggcctggtacctgattaacagggttcccaacctaacaggtgagtaaaaaaggtcacttcttggtaggcccaggaagctgaaaatattttggggacctcaagaaaaaaggaattcacccaaatctgtaggtattgctggtgaaggctgatggattggtttccagctttgataggctttaacagtctaacctgaaattccttattaaaagttgcaacaaagcagactcaaaaagagcttacattgtcaatcattattcttgctatttttatgtaataatcaggccaaggtcaatgagattgacttattttgcaacaaaaatagtgttactttgattatctttcatagaaataggggtgattgtagagagaactatgctgtttcaattgaaaactatagcacacccttgtggattgtcaaattctagccgtgttcactgcctttcagcttttttaacctctctgtaaactgactcctgctgtgttttgcattttgtcagtaattaacatttctgattttaatctcacctgatttggcaccactgagaactaaaacctgactgcctagatccgtattgacactacccagaaaaagccctgcaagctgaaactgggcccttccgtgctctgctctgagaaataaccataactgtcacattgtatatgccattcccagagacattcaaaccacaaacccagaaacacttcagactgccacggcccgtcctccttctatcacctagagatgcgttgagcccaacattcagaaatcttctcaactgattgccctctggcctcagaaactgggtttataaacagttctatctattaaccttggttttcttttgtttccatagaaaggtcctcattaaatgtcttacagcaccatatagagacctaaccggtgggcaccctattccctctggcaacacaatctcttgagatacaactttctgagtaaactgaactcttatacactgttggtaggaatgtaagctattcccaggactgagagactggttcagtgagatggggcaatgtgtttaaatttgtccttttctgcttactcactctcgttccaatctgttttccttccctttgcagatctcttatcttgcaacacctaatccgaatctctctcaacagctacaaacttggcttttgatgtatgaaacgtcctgagaaaaagaaagtttcaaagggtgggataaagggttccagaatatgccacccaatatatggattattttgagctaaaagcaactgagaaccaacagacacaggaaaggctctttctgtcccctaactgcctaaaagcagaatataaatttccccttttgtaaaggaaatttatatttataaagtaaatttctcttggtgaagattcctctgtaccagaaagagagctaggcctggggataacccatcacctgagacactcttacctgcataacccttatttacatacacgtatacatttcctgccttactttctcaggacttgtcttctctactcagaagccccaaacccctttccctttgtttagtctgagatgctatataagcttcaatcatctgggtctccttgagtcttttctttgtgatactcccacgtgtatgtatgcacataattaatctgtttttttcctcttgttaatctatgttttgttagtttaatttccagggcctcagccatagaatctattgggtagaaggagaaaaagttatttgtctcccctagaagccaaaatgcagtcctagccatagcaatcaagcaagagaaagaaaaaaaaaaaaggcatccacattggaaaagaggaagtcaagttgtctctctttgcagatgacatgattttatatatatgtatatatatatgtatatatatacatatatatatacatatatatacatatatatatacatatatatacatatatatacatatatatatgtatatatatacctaaagactccaatttaaaaaaaaaaaacctctaagaactgataaattcagtaaggttgcaggatacaaaatcaacatacaaaaatcagtagtgttctatacaccaataacaaagtagctgaaaagaaaatcaagaaaataatcacatttacagtagctacaaaaataataaaatatctaggaatagatttaatcaaggaggtgaaagacctctacagggaaaactataaaacactaatgaaagaaactgaagaggaaacaaacaaatgaaaagacatcccacactcatggattgaaagaattaatattgctaaaatgaacatactatccaaagcaacctacagatttaatgcaattcctaccaaaatatcaatgacattcttcacagatattttttttaaatcctaaaaatcatatggaaccacaaaagaccctgaatagccaaagcagtcaggacttaagcaaaaagcacaaagctggaggcattacactacctaactttaaaatacactacaaaactacagtagccaaaacagcatggaattgatataaaaacagacacatagaccactggaacagaatagagagagccaagaagtaaatccacgtatttatagccaactggtttttacaaagacactaaacacattgggaaaaggacaccatcttcagtaaatggtgctgggaactcggtaaccatatgcagaaaaataaagctggacccctgtctctcaccctatacaaaaattaactcaaaatgggttaaaaagttaaacctaagagcagaaactataaaactactagaagaaaacatagggaaacactccaggacatcagtctaggcaaagattttatggctaaaacctccaaaacacaggcaacaacaacaaaaatagacaaatgggactatattaagctaaaaacttcttcactgcaaaggaaacaatcaatagattgaagagacaacctgtagaatagaaaaaactatttgcaaactattcatccaacaagggtctaatttccaaaatttacaaggaattcacacaatttaacagcaaaaatataaataatccaactaaaaagtgggcaaaagatctggatagacatttctcaaaagcagacatataaatggctaaaagttatacgaaaaatgttcaatatcactagtcatcaggaaaacacaaatcaaaattgcaataagaaatcatccactccagttagaatggctattatcaaaaagacaaaaaacaacagatgttaatgaacgtgcagaaaaaagggaactcttatacaatgttggtaggaatgtaagctagtataaccattatggaaaacagtttggggttacctcaaaaaattaaaaatagaactaccatatggtttagtaatcccactactgaatatttatccaaaggaaaataaatcagtatatccatgggttacctgcacctccatgcttattgcagcactattcacaatagctaagatatggaatcaaactgccttcatcagtggatgaatggataaagaaaatgtggtatatatacacagtcattcttctattctctgtctccatgaaatcaactttttagcttccacatatgagtgagaacatgtgttatttgtctttctttctttctttttcaagacaagatctcactctgttgcccaggctggagtgcagtagtgcaatcaaagctcactgcagactcaacctcctgggctcaagtgatcatcccaccccaacctcccaagtagctgggactacaggtgtgtggcaccatgcctagctattcagcctttaaaaagaatgcaatcctgtcatttgcagcagcacagatgaaactgaaggtcattatgttaagtgaaataggtcaggaagagaaaaacaaatattcatgggtgtggtggttcactcctataatcacaacactttaggaggccaaggtggaagaattgcttgagtccaggagttcgagactagcttgggcaacatagtgaaaccccatctctacaaaaaaatcaaaaaattatctaggcatggtgccacacacctgtagtcccagctccttgggaggttgaggtgggatgatcacttgagcccagaaggttgaggctgcagtgagctttgattgcactactgcactccagcctgggcaacagagtgagatcttgtcttgagaaagaaagaaagaggcagggcacggtggctcacgcctgtaatcccagcacttttgggggctgaggcgggtggatcaccaggtcaggagatcgagaccatcctggctaacacggtgaaaccccgtctctactaaaaacataaaaaaattagccaggcgtggtggcgggctcctgtagtcccagctactccggaggctgagtcaggagaatggcatcaacccaggaggcggaacttgcagtgagccaagatcgcgccattgcactccatcctgggcgacagagccagactccgtctcaaaaaaaaaaaaaaagagaaaaaaagacaaataacacatgttctcactcatatgtgggagctaaaaagttgatttcatggagacagaatagaagaatgactgttaccagaaacttggaaggtggagaatgcaaggatgaagagaggctggttaacatgtacaaacatagagttggacagaaggaaaaagttctagtgttgggcagcacagtaaggcaactatagttaacaatatattgtatatttcaaagcagctagtagagaagatttgaaatgttcccaacacaaagaaatgataaatgttcaaggtagatttcctaaataccttgatcattacacatcgtatccatgtatgaaaatatcacatgtattccataagtatgtacaattattatgcatcaataaaaaaacttttaacccaaaatgcaaactggagaattttacaaagaatttgttatttaagggttcagcaaaaggttttctagaaagaaaaatgaacagacggcacaagactcttttgcttcaggagaggaaggatccaggcccggtactgctgcaagacagcaggatttataccaaaaattattgtgtaagtttactataaatattaatagacggaagtcgcagagttttatttaagatcctgaccagtgccaaaacaacagggaggcagtaatgtggactgttaacaaacctcagaagaaacaattggatatgtgtgtaattcacatacaaaagtgagcagagtagggtgtatgtcttttctgtgtcactgatgggttgggtcactccgggacaaacaattcaattctctaaggctcagtttcagccatgaggtgaggaattgggctgattctcaaagggttatccccagaccaaaatcatcagcatcaccagggaacatattagaaatgcacattttagctgccttcctggacttacagagtcagaaactcagggcgagtgtggtgactcatgcctgtaatcccagcactttgggaggctgagatgagcagatcacctgaggtcaggagtttaagaccagcctggcctacatggcgaaaccccgtctctactaaaaatacaaaaattcgctgggtgtggtggtgtgcgcctgtaatcctagctactctggaggctgaggcaggagaattgcttgaactcgggaggcagaagttgcagtgagccgagatggcaccactgcacttcagcctgggcaacagagccagactccatctcaaaaaaaagaaagaaaaagaaactcaggatggtgtccttcaacctatgtcttaacaagctctcttggtggcatccagtaaagcttgagaaccactgagcaagccactggacagatgatctctaggtccctaatagctataaacacacaaatttaattgtaagctaaggaggaaaattataagctgagtggtcctagtatttggtatagtaaatttttaaaagatattcaaaagaatgacataattatttttggaatggtacgaatgtttgccattgaattttacgagatgtgagaatggcgtgtacacatacaaggagtattccaaccatgaaatgacctgagttgaaataaagctaaagactacaagtgctaagacaaggatggtcacatacgcagtgggagtaatttccatacgaggaatgtacataccaagactggctcagtgtgcggacagccaagggaagtggaactttcagtgttcaaagttctacagtttttttaaaatacacgtatagattagttaatgaactactttataattagctgctttgtattaacattgcaaatgtttaaaaaaaaaatcttctaggctcattgaagttttagtggtatcatagggcctaaaactataaaacaaaagaaatcaacttctctctgtccaggcttagttgaagataataggatctgaaactgagaggttttagtttgatttatttctttctttgtttttgagacagggtctcattctgttgcccaggctggagtgcagtggtgcaatcacagctcactgaagcctccacctcctaggctcaagcaatcctcccatctcagcctctcaagtagctgggactatagatgcgtgccaccatgcctggctatttttttattctttgtagagatggggtcttgccatgttatccaggctgttcttgaactcctgagctcaagcgatccaccagctttggactttcaaaatgctgagattacaggcatgagccactgcacccagccacatctagtatgacttcttttttttttttttgagacagagtctcgctctgtcgcccaggctggagtgcagtggtgcgatctctgctcactgcaagctctgcctcctgggttcacgccattctcctgcctcagcctcccgagtagctgggaccacgggcccccgccaccacgcccggctaattttttgtatttttagcagagacggggtttcactgtgttagccaggatggtcttgatctcctgacctcgtgatctgcccgcctcggcctcccaaagtgctgggattacaggtgtgagccaccgcaccaggcctagtttgacttctataccatcctgtttctggccttctcccttcaccttcagatacctgctctttaatttattttccttgtcagtcatgtgtgttggttaattcattgactgcttacacttgtatatgaataaacttcacaatgctctttcaatcaagcattttcattttgtttttaataatgaattctaaaaggaaagatcctgtctatctattaaaggagctccagatatctcttaataggtagggaaattgttggaaggagcagaaaagcctccaagacagtaagagttcttaaagtagactgagtgaccttcttggcgtagggttgggaatagcagttgtagaggagatggtaaaggacgcagtccaggaaattgtggtaaaaattaatacagaatacactggctgctttgctaaggaactttctcccccagcaaggacaatctgccaggtggctaggcaagatggtctgtatttgttgtcatgaaacctgtgtggagtttcttccaggagtgaagccttcctgccctacagttcagctctcctgcctccttcctgcttctgtgccccatcttttcatgcatgaatacagatcagcttctctctccttcccctaatcataatccatctgctgtcccaggagccagggctgctgtgtcagttctttgagtggtgccctacacaaaagaactggcttaagtggcgccctgccaagtggactaatgaaggctgaaatctagcccatgcttccctcaccaaaccctgagcttgtgggttacttatttctaactcacacagaggtactctatgggctagctgcaaccatggcataacccctgtgttgtgttttgggacactatagtagtgctcttaagaaacaaaaacaaaaaacaactcctcttaacatactctctagaccgagccatgcttttcatgtcctctgtaaaacacagtgacatgtgtctgtggcacacccaagccagctgttggtaggctgctcctagtatgccccgggcacctccactccctccagttacgctttatgtatacaccaagcatccttacgtgttcccagaatggtgtatacaccaagcatccttatgtgttcccagaatggtgtctgctcattgtgcttgttattttaattatccaaattaatgaatgaactgacaaaattgtgtaaaaaaaacagtgtcatggtttctttgaaaactaatttcaacacgttgcaaagattgaaaaagggtaagtagtagaaatagctgttgatttagttgtggggaggcagctataaaagattggcaaaagaaaaatgcaatgcctaagattctgtgctctaattgctttacgtgcgttttgaagtccttgattcactttaaagaaactcaagcttagaagtcatagaccatgaattatggatgtagtttatgaaaaaaaagatgtgtcactataatcagcagacccatgctaaaaataataaaatatatcttttcaaaaagctttggccctacattaaaaaacatatatttagatgttttaaggtaaaacacaatgttcaagatatgtgtgtgtattattttagtgaatttttctattaatcgattgttgactatacccagttcagatcatgtcatataagacttctacagtattttattttgtgcctaatgagatttgtgtgtggtggtagactgttgccctttgtgatgcctttctatgtaatttcaaatatgctatattatatgtgcctttggtaacagtatttctgacaacaaagcaatattgtctcacaagaattctcagtaacaatcatacaatcacacctaggccaatccaaaatattttttaaaagcttttttaagtctagtttgacttctaaaatatactttactacagattaccacaagacacacatttggtctggcaaccactgaatcaatatttggcacctctgctgggaattttgtaaaaattgccttttaagttcaaactgactaggaagctagtaatgtattcacttctaaaaaaaagaaagaaagaaacctcggtataacaaactcagatcctttcataggaaggataatttaatatgaggttaattattcattaagggaggaaggaagaagactagaaaagaagttttgtttcatcatttcccaaccatttggaatcaaataattgtacaacttgggaagtgcggaggaacttacaagtcagaaagctgtacctttatcctatagcagaaatgtcttcttcagatcaaatggttccccactctgttttgttaccaatagtgagatgttcccaggtctagaaaggcacatgctttattgaaaagctcaacttagaaaaatcctttcttggccgggcacagtggctcatccctgtaattccagcactttgttaggccaaggcgggcggatcacctgaggttgggagtttgagaccagcatgaccaacatggagaaaccccatctctactaaaaaaattaaaaaaaaaatttatctgggcgtggtggcgcatgcttgtaatcccagctactcgggaggctgaacaggtgaatcacttgaacttgggaggtggaagttgctgtgggccaatattgcgccactgcactccagcctgggcaacaagagcgaaactccgtctcaaaaaacaaaacaacaacaacaacaaataaaaaaaaaccagaaaaattctttcttagagtgagtgctagtctgtcactttatcatgtccactttggggtattagttctgaaatttgcagatttgaacatttccacccttgtatattttcagagaactgagtatatttaacctggagaaaagatgtatgcatgtgtcctagagggattggtgtgaagggtacataaggaaaaactacctagctattaattttgcaatggaaacattgtggaggtttgccttaaaaagtagtgagctgaggtgttccaggagagagcagtgattatttactgagaggtctttagggtgagattcttactggatagaagattagaataagaagcctctcaagttacataatttgaaaagtctatactatacttggcattcaccatgacattctactctatagcatatttggtttctccaaattttcttcgtatgctatagcttccagatctttttacttttctagtcaatctgttatgaaaacatattaacgtaataaatatcctttaaattttatattcaaaattaatttttttaagagacagggtctcactctgttgcccgagctgaagtgcagtggtgcaatcgtagcttactgcaaccttgaactcctcgcctcaagtgatcctcccacttcagccccccaagtaggtgggactacaggtgtgcatcaccaaccccagctaattttttaaattttttgtagaaatggggtctcgctacgttgcccaggttggtctccaactcctggcctcaagcaaccctcccacctccacctcccagaatgctgaaattagaggtgtgagccaccatgccagtccccaaaattaaattttataatcaataaacatgatgcaggaatgaggtcatgaggaaataacctctctgtggggaccctgatagtgttagtaaaaactaatatgaaattaactgctgctaaagagccttggaaaacacagatttccactaaagtgatgagaattcatccttaggactggaatgcaatttacaaatcaataagtgaataaattattttgtagcttatttaaagaaatataggtcaagaatcccatatctgcaatcccaaaaaaatattaaaaacaagtttttttcataaccaattgagtggcagaacctgatgtaaactactggaggatacttaattatttgtatttatcctcttcacacatttggctgctgaactatttgagtgtttgacttggaagtgtactatatggcctttctaaatccaaatatccgaaatcaggagcacatctggccatacaattttggcttgggcactaggaacctgtctcatacgtgaaaggagactgatggtgggtggtatctgtgttatccgcaagaaaaaggaaaagggattccactttgaatagcatggtgtagcactctgaagggcacaataatacaaataaaaacaattagatactgaataaaacctacttttaattccatgttgggggccgggcgcggtggctcatgcctgtaatcccagcactttgggaggccgaggcaggcgaatcacgaggtcaggagatcgagaccatcctggctaacacggtgaaagcccgtctctactaaaaatacaaaaaaaattagccaggcgtggtggcgggtgtctgtggtcccagctactcgggaggctgaggcaggagaatggcgtgaacccgggaggcagagcttgcagtgagccgagatcgcgccactgcactccagcctgggtgacagagcgagacctcgtctcaaaaaaaaaaaaaaaaaaaaattccatgttgggcttacaagcagtaatggaaatctcccacctacccctccttctgcccacactaaccacagagtaaatagaaatagaccaaatacattccaaatcaaggaaaaaaaggggaaagaagactttaaaaaccagtcattccgaagatttcaagataacatattagtcacaataggctacattatgccgtggtgataaattaacttcagtactcaccaacatcacagaaaatttatttctcactcttgccgcataccagtgcaggctggtaggagactctgctgcacatagtcattgaagggcttgattgatagacgcttttccattcagcatgttgtaagttgttgcaacaggataaaagaacacatggagacccccaaattcaaactcagccttggaccagaagtgacacatgtcactttcattcctattgcccagcatcattcatgttgcctcctctaaatgcaggtgtcatgtagggcagacaagaaatatttgctgatcattactgtctcttccataaaaggataaaagagaaacagcaaaagtgagaaaaatagaaattttaaagtgatgcagtataaacaaatccaaataaatctataatcacaacactcaaaaagcaagtaatgtcataatagatctttaacatctacttatatgttcagaagagacccacctaaatgttagaaaaaataaagcttgaagtttagaagacaagaaaaggatgtaataagcagatataactaaaagaaagccaatgtggctgtatttttatcagaaacatataaaattcagactaaaaaattattaggtataaaaagggacactcataacaatttttaaatgctcagttcaccaagaagatataaaaattctaaacatgcatctaataagatagtattaatggtatcaaattatgtaaagtaaaaaattagtacagtgaaaaaaatgaatgaaacttacaaagcttaaaatacttactatctggccctttacagaagaatttgttgacctctgtacatgaccgtaaggtactttagcaatgttcaaaatattggcatcaaacaacaacaatctttgaaacataatgcaacaaaatatggagccaataaaaaataaataatcccacactcttgaaaatttaaaaggaaactatatttttaaataatgcatgggtgaaaggagaaataatgatggaaatttaagaatactatataccaaataacaaaactattatatattaaaacttgagaggtggctaaggatggccaattagaacactaataagggcattaattgcaacacattgaaaacagatcaaatatgtttcaattcatgagtttagatatttgggggaaaagctagttgatcaccttgggaagatgatagggaactatttaaataaagagagaaaaatcaaggatttatcatgcctttcctacatgaaccataccactgagcagtcagtaatgaatcacctgaaaatattggcacaaggggacaagttgaaacatgcaaggaaacccaagaggccagtcatttccagctgcccaaatgggactacagaaaggcagcttttagagagatctatggaaaactattgcctctgacggcagaacatgaaatttaaggagagtgaggacaagcttggttccaatggggacctctgcatccatcactacatccaactgccagaaacttccgaaagctacacctctacgtctgccttccagatttcatgcaggctcctcttttggccaactctcattcagaatcacaagagaaagggaattttggaaaatgtcatagcaattcagtgtagtccctctttttcaatttggtaactatatatcctcttttaaccacttccagataaagataatagcaaaagtatgtttccacttaagatggaacaggccttcatatacctaaaaagatattgatccagtctcctacagcagggacccctaacccccatgccatggaccagtactggaccatggcctgttagggaccgggctgcacagcaggaggtgagcagtgggcaagctagcattattgcttgagctctgcctactgtcagatcagccatggcattagactctcacaggaacatgaaccctattgtgaactgcatatgcaagggctctaggttgcatgttcattatgaaaatctaatgcctgatgatctgtcactgtctcccatcacctccagatgggactgtctagttgcaagaaaacaagctcagggctcccattgattctacattatggtgagttgtataattatttcattatatactacaatgtaataatgatagaaattaagtgcacaataaatgtaatgcccttgaatcatcctaaaactatcacccccacctcctggtctgtagaaaaattgtcttctgcaaaactggtccctggtgccaaaaaggttggaaccgctgccctaaaggatacacaaatgagatccatctttggatgatgtcgatttatcttttagcccactctcattccccctttggtacgctgtaacttaaatactaatggataaagttaatacgttatgttagatagcagaatgagagaaaaaagaaaagacgaacaaaggtggtgtgtgtttaaacatacgtatttaaataaattcatatcaaagaaaaaatacactcataactactaccaaactcatttctgcaaattggtcacatggtcatagctggtatttagagtttccttttcccactatccactcagcattctctgctctcaacaggcaccccagatttcctggaggatgacccaaaccttcattcctgaagggtctgtaacatttacagtcctgctgtattgggtgttgcagttttctatcaacttttcatcaaagtagtataaagaggtgcccccaaaggacctgttcaattctaatgatactcctctctgcttccatcatgtagtagcaacccaattttcccttaaggatcagaataaattatgctagctaggagagtaagccgcaccttccccttgcttttttttttttttttttttttgagacagaatctcgctgtgttgcacaggctggagtgcagtggcacaatcttggctcactgcaagctccgcctcccgggttcacgccattctcctgcctcagcctcccgagtagctgggactacaggcgcccgccaccatgcctggctaatgttttttttttgtttgttttgttttttgtttttgcatttttagtagagacggggtttccccgtgttagacaggatgatctcgatctcctgactttgtgatccgcccgcctcggcctcccaaagtgctgggattacaggcgtgagccacgtgcccggcccgtttttttttttttttttttttttttgccagtaggttcagtggcataaggagctaaaaatggccccattagagtctcagattctggtttgatagaactgctgttgtgttcccagtagaggcactcttcctttgggaactaaaacctctaaaacagcagataacaaagttgggaggatggaaaacccaatttttgctagcaggccattaaagttagtaataagaggagccaatcgcattttctccctttaattctctgacctgagggggaaaataagcaccacacagttattgcgtgctcagtgcaacaaattgcatcctgggacaggtgcagtggctcatgcctgtaatcccagcactttgggaggccgaggcgggtggatcacctgaggtcaggagtttgagaccagcctgaccaacatggtgaaaccccatctctactaaaaatacaaaactagatgggtgtggtggtgcgtacctgtaatcccggctacttgggaggctgagtcaggagaatctcttgaatccaggaggtggaggttgcagtgagctgagatcaccccattgcacttcagcctggacaacaagagcgaaactccctaccaaaaaaaaaaaaaaaaatgcatcctggaagacactactgtagccctgcaacgtgttgccctccagctgataccacagctgagtctccaaagggccatctactatcctatcaaccaactacctaaaaatgatgaggaacatgacaagcccagtggactttatgagttctagcccattgctgtaatttacttggcataaaattagtttcctggtcagaagcaatgtggtgtggaatattatgagggtgaatacggcattttgcaagttcggaaaggattgtttttccaggagcattgcaggcagaaaaaacaaatccatattcagttttgcccattggaaggatttcccttaagcactgtaccttagggcgccccttgagggcctgcagtgctgcagctgtccacttttaggtggtgcccgcatgccttgaaaaaccatctgtaatcaggcctgaattttctcttccttagtaaagtggacagagagaacttcccatgaggccatgggtgtggactgagagagagaagccaatttaatatgaataagagccataggaatctgagccagttacacatgcagcttacttatgactttgggacctacataagcccaatcttggatatattatttctacttatattggagtgctgctgtggacgcccaacctatggcttagtgagtcaaacaacatcaagttcataatggggagttcatattgcataacaacttgatagtccaaagtcaagcattcagtcttttctagggttcagtagcaaatcagaagctatttattaaaaagagaaagttaatctttagaagatggcacatagctttgcttcccagtcctgaaggtctataactcacagatagggtccagccaagggcccacacagtctcccaatctgtcagagacatttcaagtatcagtggatcttctgtatcaaagggctccgagggcagaggagctggcatgcagcgtggacctgttgaagagccttcccttgtgttaggccccactgcaaactggaagtccactagcagttgtgcttttttctttggggtagggctagatgcagcaacttgttcttcacttttgaagaggtatcttgaccatgtcccagatcagagggggcagtcactgaagtggagggctcctaaactttggtgaagttgatttctcgtcctctggctatttgctacttctcgcttatccagtccagtcaacagcgtagcatcaccataattgagtagaataataacttgtggaattgagaggcaatcaatgtcttttcagactagattataacagagggcttcagggttgataaaggctcaaaataggacagtggaggggtagtgctggccgtaacaattaaaagcagttataatctttaccatccatcctctaagccttttatcgtagcacattctctgcaatccctccaagaattctatgctgcctttgatttactattttagcaggtaggcacagttctagggactccttcctggacttttctatcataaaattccttactgcccataatatggtttaactgtgtccccacccaaatctcatcttgaactgtagctccaataattcacatgtcgtgggagggacccagtgggagacaactgaatcataggggtggtttcccccatactattctcatggtagtgaataagtctcacgagacctgatggttttataaggggaaagcccttttgctcggttctgattttctctgttgtctgccaccatgtaagataagcttttcaccttcttccatgattgtgaggcctccccagccaccctgcggaactgtgagtccattaaatctccttttctttataaattaccgaatctcaggtatgtctttatcagcagtgtgaaaatagactaatacggcccataatttggggaatcaatttgggaatctgccatttgctgaatatgtgaattccacctctgcattttagaattgggaaaataatcctagggttcaggtatccaccagacccactatgagttgcactcaggccaaaacctccacttatttcctgacctcttaaggccctactgtgactggtgcaccacagtgacattttgggtttctaggaacagtgctagtgtgcagcagtcctcccaaagtctacttatttcccctcccacaaggtacaatcacactgataagtggccacagatccctttgggaaaggatagtaagatttacaatacattttttgcagtctagcagcattcttccacaaaaggccttgcttccccttgattcaaggggctctgtgtctatggactagatcaggtgtggcaatcaatcagctgaggatccgggactgctctggaatttaactcaagacttttctactccacacctagaactttttttgtgtgtatataaatcaagtaaggctttagtaacccatcattttattttattttatttttgagacagagtctcggtctgtctctcagactggagtgcagtcgcccattcttggctcactgcaacctccaactctcaggttccagtgattctcccacctcaacttcccaagtagctgggattacaggcccgcgccaccatgcctggctaattttttggttttttttagtagagacagagtttcaccatgttggccaggctggtctcagactcctgacctcaagtgatctccccacttcgaccttaattctagggatatcaaaataaattagccaacaccaaagatcaaaccattctgattatcactttagttctgctgtccattattacaaccatgtttctcttgtccctagcagtaaagatagttacgtgatgtcacttggtgcctctgttccagtatcccactatccccagtgaattgtgggatggtggcaacattaatggcttacagagaatggctactatagaactccaaaagggttctggtgtttgcttcagcaatgctttctttctctctttctctttcttcctttctttctttccctcttttcccctctcccctccctccccctcccctcctctctcctttcctttccctcttcttgctttctttcttttctgtctctggctctctctctcttttctttctagtgatgagcccctaactctgttgcacaggtcggagttcagtgccaaaatcatagctcactgcagccttgaaatcatgggtttaagcgatccttccacctcagtgtcctgagtaactgggactacatatgtgcaccaacctgcccagcaacaatgcatttcttaaagctttgattaaaggagaccctcccaggtcctaacgaagggatcttacacaataaatccactccagcatactgtctgcttatcttttggataccttctgtttatagcaatgggagaagaattcatgaaagatgtagttttcaggtactacttaacagaaaacaaatggtttcgtagtgtgtgtgtgtgtgtgtgtgtgtttgtgtgaattttgaatatgaacaaggactaaaaatagaaattggaataatgaagtaaggattgtgatggttaattttatgtgtcaaattgactgggccaagatggccaagtagctggtaaaatactactttaagtgtgtttgtgagggtgtttctggaagagattagcattggaatcaataggccgagtaaaaatactgccttcaccggtgtgggtaagtgtcatccaacccattgagagccctaatagaacaaaagggtggaggaagggcaaattctgtcttcctcttcttgagctgggacatctgtctttttctgacctcagacattgaagcttttagtgctcagaccttcagccttgaactgggagttacaccattggctcctctccttctcaggcccttggactcagactcagactcaattataccaccagtttcctggttccccagcttgcagatggcacatcttgggactttttaatctccataattgcacaaaccaattcccataataaatctcctcttatgtatctatctatttatccatccatctatatcctattgattctgtttctctagagaaacctaatatagtgttttagcagagacgaaagattcaatagtgaaaatgaactacacaatttggtggtggaaaaagggacatggcaagaatccaaaccagaaaattgttacttctagaaagataactggaaatatagaggagaatctgtgaataaaacagaaaaagttggcaacaggcaatatatgaagcatagaagagatcaatatgtcaaaacttattctgaggttcattaattcaaaggttaacaatatggtggcattggtaagaaaggtggcgaagccataaagagaaaacatatggaagacagtagtttgaaggtcaggtagaaaaagatgtgacaaaaattgtgaaatattctaaaaatatagctgccaaagagtgggctgatggaaagttgattagtatatgcagtgactttataatgtgacaacttggctaggttgaactacattcccagaattccctttatgattctagttatggtgggccacagagggagagtctggagtgatttggagggtagatataaagcagcaaacatttttttagctcatgcacatggtcatttaactgttggctcacctcatggggatgagccagtgactggggctgcaactactccacctttaacatgatccttcttcagcttctgcaactcctgggccgggtatgtgggtgtttagttctgtggcaaaggactccagctcgtgtggaacacccaggccatcaaggtcagaggcaatgagaattaatatgggttttggttcactctcacgagatccacttcatgcttttgagttctagcttataatttgtttcacccactttacatccatcttctcttcccaaatggctgccttaaatatatttcttttatgatgtcagtcagcatgcaatcaaagaagcagaatacacacacacacacacacacacacttctgcttctctgattgtatgatgactgtataataaagtctttattatacagtatgccctaaacatacagcttagggcactaattctcaatatttaaaactccatgtcttatttggataagcatacacacttctcctctcctttcccttttcaccagttatgacagacccttcttaaggaaacatgcccattaggatgaggaatttctggtctggcatagatatagcgatagcatctgcttttgtagtttgtattgtttaacatgcaattactttcattttttcaaatataacattatatgataacgactataaattttcaaattaaatgcatccacttccacttttttgtttgttttttgtttttggttttggtttttttgcgacacagtcttgctctgtcgcccagtctgaagtgcagtggcatgatttcggctcactgaaacctccgcctcccaggttcaagcaattctctgcctcagcctcccaagtagttgagattacaggcatctaccagcagacctggctaatttttgtatttttaatagagacagggtttcaccattttggccaggctggtcctgaactcttgacctcatgatccacccacctcggcctctcaaagtgctgggattacaggcgtgagccaccgtgtctggcacttccacatgttcttaaatgttcatccttccccactctttgcccctccacatgactctttttggagaatgaagattagacatacaggtttgtctaatcatacaggtttgtgtgtagaaagtcttaagagatcgtaattcactctctaacacccaaaacaaaccagataatctaaataattatagtttaaaaaaatcggagatatgaaagcacaaagaaacataggtgaactaaacttcagaaagggacaatcattcaattgagaggaaagagccacagttctcatccctgactgaagtggaaagaggaggaatcaccataattaatggtaaggagaaagcagcctaactttcaacatattttaaagtgtgtggctgatgcgacaggttagaatacacaggagccacaggcacagagcaaaaccatactacctcgcaattatttctcattgatattcactaactcctggggtaggaccacaaaaacaagggcaatacagagttattaaaactttcagagacacattggggtttcagctaagaaagacttgtagagggacaagagagctgaaagaaaatccccagcactccaggctgtcagctaagaaagactggtgcagggaggggagagcaggagcagaaagatcttcccgtaagacctgaagctagggaggacactaaccagggcagaaaaggtgagaataacaactctaagacaatatttgcttataggaaaagttctaatcctgccttcaaaatatttgaagcctatagtaaattgaatcaaactaaagttgaatcaaagcccaaacccagcccaactccagatcatatcaactgagccccaacttccttcttggaagaaattttttaaatttaatttttaatttttaaatttaattcattgtctactgtatttttacataaaaatgtccagcacacagtaaaaaaatatggaaacacacagatacatataaaaaaagaaaatatgggccaggtgcggtggctcacgcctgtaatcccagcactttgggaggccaaggcaggcggatcatgaggtcaggagatcgagaccatcctggctaacgcagtgaaaccccatctccactaaaaatacaaaaaaaaaaaaaaaaaattagctgggcgtggttgtaggcacctatagtcccagctactagggaggctgaggcaggaaaatggtgtgaacccgggaggtggagcttgcagtgagccgagatcgcgacactgcactccagcctgggcgacagagcaagactccatttcaaaaaacaaaaaaagaaaatatgatctgtagtcaaaaaaggaaaccatcaggccgggcacagtggaacactcctgtaatcccagcactttgggaggccaaggcgggtggatcacgaggtcaggagatcaagatggtcctggctaacagggtgaaaccccgtctctactaaaaaatattaaaaaattagttgggcatggtggcagtcccagctactccggaggctgaggcaggagaatggcgtgaacccaggaggtggagcttgcagtgagctgagactgccattgcactccagcctgggagacagagcaagaaagtaaataatgaattacataggcttaacggtaaattggaaaaaatcagaggaagaaaacttagaaagaaataagtagaaagcgttcaaattgaaacaaggcaggtgtggtggctagcactgtaatctcactttgaaagctaagacaggaggattgcttgagaacaggagttcgagaccagcctgagctgatctcaaaaaaaaaaaaaaggaaatacaaggaaataaaacagagtatttgagatacatggaacaataatatatggtctaatacttgtattaagaataaaaaaaggaaacagaatgggtgtaaaaatattcaaacagataataaatgacaattttctaaaactaatgaaagataccaacccacagatccaataactgcagctgacatcaaggtgaataaatgataaatgcaaagaaaaccactcctgtgtacatcatagtcaaaattctgaaaacctaatttaaagagcagatcttaaaagcagctacagaaaaaagtgtacactgtacacaggggcaccaaaatatgtactacaagtgattttttagcaaaatatgaagtcagaagaggaatgacatgtttaaagtgctgaaagaaaagaaaatgtcaacataaaattttacgtacagtaaaaatacccttcaaaagtgaacatgaactaaagacatttagaggcagacaaaagctgagagacttctccaacaaacagcacacaggctatgctgagtgaagttcttgaggccaaagggaagataccagatggaaaaccagatctgcaaaaaggaataaaaaagtactagaaaggataaatatctgggcaaattaaaaagagacatactttaatacattcattatatgcatatatttacaaatttctaaataccataaaaatacaatgtaaaatgaattttataacatatagaagtaaaatataacacaacaatacagaggatgggagagggataaatggaattacattgtaacttttttacagattcataaaatagaataatattatttaaaggtagcctgtgataataacatacgcaaattgtaatttctaaagcaaccaccatatttaacataaagaagaaaatctaaaaagacaatctagtaatttaaatggaatatgaaagaaaaaaatccaatttacccataagttctcagaaaacaaggaacagagaaacaagcgacaaatggaaatgaatgaatgagaaaaacttccctcaaccactgttattgaacactgaatggctctgcaaataagcttttactacagactcaataatgtttctttatgaatttaacctaaaactacaaggcaaaatagagcttatatgcaaaacttaaactgcagtaaaatcattttgacacaactaacattgtttgaatcacaaataatgtcaagctgttttacacacttctcatgctgtcaaaagttaaaacaagaagcaagatctccattccaacacaaatttgcagcagttatgtttttctgaactcaaactacagtaccaacagtgttttctgaatttcaatgcaagtgcaaaggaaattttcatatttaaaatttacttaactgtgcaactgagaagcttccatttaaccttcaactggaagtgattaatctgcaatgtaatggcatgctaaaggggaaatatcaagagaatttatagaattctaatagaattttagaaatgccttctaagcaatgaatacactcaagtaaaatcatgtgctcatgggttggtatcagtatttggcggtatctgtctgggtagaaagacatttcaaaaatgaagtacataaaatctcataaaaaatcagcattaatagatgaacatctgcagtcaatttttatgaaagaacactttgaacaccaagtgaaatgttactttccccccaaaagaattccatgcctttcattattatacctgtattaaaattgctattattacactttgaattgacaaaataaaaaactgtggacttttttttcttcgtgttatataagtatctacctgacattctcaattttgtctcttggcccacaaagactaaggcatttacagctgggccctttacagagattggcaacccctggtctaaatgtagtttttgctacagttgtcaactatgttttttgctttggaaccacaaacattctacttcaaactactacttctatgaatcacttgtagacgttgaggaggagttaggaagaaaagtcgagaactaatttagtcctggggttaaataataattgtagccaacttgaattgagcacatatattgtgcagctctctgctaaggaggcatttgtatatattttcttatttaataagataatcttatgagctaggtactatttctccccattttacagaagcttagtgactgtgttgtcagggatcacattgctaagtgatgtggaagacataacctagcaatgggacatctaaaccaatgtctgcaacatcaattaagaaaagcaaaagaggccgggcgcggtggctcacgcctgtaatcccagcaatttgggaggccgaagtgggtggatcacgaggtcaggagattgagaccacggtgaaaccccgtctctactaaaaatacaaaaaagattagccgggcgcggtggcgggcacctgtagtcccagctactcgggaggctgaagcaggagaatgacgtgaacccgggaggcggagcttccagtgagccgatatcgtaccactgcactccagcctgggcgacatagcagactccgtcttaaaaaaaaaaaaaaaaaagcaaaagaatacagaaaattgttaaaggggagaagggggtggtcaaaggcagaggagtcggtgtggacaagacagagatctcttggagagagggcaggactaccagttgacaaaacctgttcaggttcctggaggctcacaaccaccagttcccatcatcccagcaacagcactctttcccaccctagcctcgttcgtaatgatctgatcaatgtgtgaacaaaaatattgtgtgtacaagtctcaacacatttgataatgtgaagaggtgaaggaaagtgggtaggaaaaatctgtagggtggggagactcggggaaatgtgtcctggtccagtgcaggtaacatatatgggtatatatgcgtatatacatatttataccatatttaatatattactctattaagaaattataacaaatttccttttacattacacatccacatattaaacccccaatatgtgctaacaaggttagaatttaagtataatgataatgttctcagttttttgtggtggacactttaagagagtgtaaataataataaaaataatagagtgatcagatcacttgtgctcagggctagacccttcagccccaacggccttaacccccctcaactgcttttccaaccaaatattcctccccctgcaggatcccagggccatccaatcaaccggccaatgacggtttcagagaagcggtcctggggaggggtattatctgcaggaacacgtcctgccaactttgtagtcgagtcacctatttcggttggtagcggccgctatttctttaaaagggcagtggatttcgaaacaggagggggaggtcaggaaaaggaactcagctgcctttgataactgccctgcagccttcccttcccggagcgcgtgctcggctcgggaagcgcccgcggccgccgcatccccgagcgggcgcgtggcgccacctctttccggggcgcccaccttccccgggaatccccccgcccgacggtcccccagcgtctgcggcgcggccgccccggctttgtctccggcgtcgcgctcgggcgcccgctctccccacatttccccgtgtgcaggctgtaacccgatctcccatttcctggtggattctcttaaagaggcagcggtcgagaagcagaacaaaggctattgttttatttcctccttcggattccgcgtcctaaccggaatggcccttcatagataattactttcgttgcatctgcgcttagtgaaacgtttcaaaacccttgtgcacatcgatgtatccaagagacggagccaggggaggtgggaggagtttaataaaacctgttttgtggtgtctggggccacaatgtaacgttttttaaaggtgtcttccttaagcccggaaattggctcggccagcgggaggtctcgcggcgtggagggcgggcgcccgcaccgggggccggcctggggggctgcgccgctcgccccgctcgcagccgcggccccacgcggccccgctacccgggtttcctccgcccgcgcccccgcggccgcccctcccccgcgcagcttttatttccccgatgccgggctgtaacccgagcttttatttcctggtggctcctttaagaggcagagctcagtgctgggaattcacgtcagtttctgcactgaaactctcaagatcaatgagcaaagagctttctcagttctgcctttcagtttctctcttccaggaaggaaaacattcgagagagcgagggagagccgcgggagggcggggggcgggggcgccggctgcgggtgggaggagagaccgggaggccggccgggctgcgtcccgggtccccgcgccgcgccgcgacctgcagaccccgccgccgcgctcgggcccgtctcccacgcccccgccgccccgcgcgcccaactccgccggccgccccgccccgccccgcgcgctccagacccccggggcggctgccgggagagatgctggaagaaacttcttaaatgaccgcgtctggctggccgtggagcctttctgggttggggagaggaaaggaaagtggaaaaaacctgagaacttcctgatctctctcgctgtgagacatgtctgagactcctgctcagtgtagcattaaggtaaaaatcttctcccctccttctacgtggtggaaaccctgagctgcaccggccagggcagtcgtgctgggctcctcagagcaggctgttgcagttgctctgttcgcaggaaattatttggggcgagagggaaagagatgcagctcgcggtggctgctgtaccctttagcgtaaccttgctactcccccccaccgccgagcccctgccggctcctcggcccccacccccttgctttttgacaatgaaatgccggtcacaattggtcagagcaacccggattgtctccagaaccgtaaaacacccccgtaattagtgcgcttaaaaaaaaaaaaaacaaaaaacaaaaaaaaaaaacctgctccctattcctacacccaacatgtgactgaaatataacttttgttcccgaggggtggtcgtcttagaaaaaaagttgttcagtttccactgcgatagaatctttttatttttttaaaggactctctgggtctgatcagacaggatttttttccccctcgtctgattgtaattgcaagcgctgtcggagagacagtcctggtgtcagcttttcctaggcattgcacaatgaatttttttttaaaaccaaggtgaataaagttgctgaatagttattttactccgatccatatgaaagttgagcaatcccaaagtagaaaactcctgtgatggagggagaggaagaactaagcaaccaggcaaaatgaccttctgtgtttgacagtgcagagaggctatctaagcagcactctgtaaatgcagggcggtagatgtttgtaaacacactgctgggctacccagtagttgtgtgtatgcatgtctatatatctgtaaagactgtggtgctgcggtttgttgcttctaaaaagttgttgtaaagtttgccaccattgggaggcaggatgatttatccatctacccgtgttatttttcccatcgctgcatttattgtacactttattcatttcgctgttccaccagtacccaggtagaaagccttccgctcttgtgagaggctgaagctgctgaagtttgtttttggtttggcctatttaatgtgtgttcactgaatggacactacagcaacaatgaacaaataacctgttttcttcgtctgtggggagttagaaaaacccttcctggtttaacactgcctttcaattagagtctgtgtaggggaaacgcagtagttcatcatacgtgcttactaggttttttataattagaatcacattttggtgtttcttatcagaaaagatattcatgggtttgaggataggctaatgtgaaatcaaaaggtggtttgggcttctttgtttttgcctcacaaaaatgcctaatggaacttttaggcttttgtgtttgtacataactggaggtagcagtatgtatgtctgtgggcatggggcgtgccacactaaagaacttagggtactttgatattaatacttcaaaaccagtttcttttgcggtataaattagattctacacagagttcaggaaaatcctgcggtatagataatctaatttatttgacgcttcataacatagaggtaactaaatagtaggatattcaataaataaattgtatttggctcagtggcaataaacccgacatcaggaaaatctgccaactacagatcagtaactttagggcaaaaacaacaaaaaacaatgctttctgtgacgtttcttgatcctcttctatactgcatccccaccgttttgatgggcttatggtggtgtgctggctgcagactgctactgagtggtttgtttcattgtgctccagtcggaaaaagagtacaacagtcccttgccttactcacatacagaaccaatcccaagcaaaacgcgttcttaaatgcaacatgaaaattgtctgtaatttgcatatcatttttttccttattgcttacaactcagttctttcagggtgcctcttttcattactgtgtacttctatgtaattaaaatagatttaatgttctttaccagaaaggaaagaatcacttttattttggatcgttctttatggaacgagtatgtatttgcttagactgcatgtgtctaggtgaacgtatgtgaagagtatctttccatggagtttgtttaattcagtgttccaataataagcactagagatcaaggactgggattattccaggtcatctgaaatgttctggtgatgtgtgctgcgtttcatttagtccttgggatgtggtacggtgactgcataataaaaaatgtttgctggtaacccacaagcaagttgcttgcttctagagtccagtaaacaatatgcttttctgtgtagtgaagaacgaatgtcagaggttttcaaggatgagctgatgaacctgatataccgaactcctgtgacacaaaaggctctcactgtggagaggtttttcccagtcctcctctccactcctgaaaccgtcctcacttgctttcattccttacaagtagcgggtcagcaggcagacagttcctcagcggctggtgagatgcagccacagagggaagtactttgtttatttctgagcagtgcctgctctgctagaaaagagtagtgtccgatttgggtggagtttccaaggtgaaagtttctgaattggtcaatcagtgacgcctttgtaaagatggctcatgtggtggtcgctcgcaatgaatgcctgataagggcttttctgtttcttttgcactgtgtaagtttgctcccatcgcctggggaagttaatatcagacacacactttttacggtagaagagaggttgactactccaagggcactgaaactctcactgagccttattgtttctctacacgcgacttgcagaaagcaggagtgctcgagcactcctgggggggtctgtcctacaacccttgaaggttgtggcactgttgtcatggaagttcaaatgcttcaattcctgaccatttggggtcgtttaaatggaaggaaaggatcaactctctataaaaagtcaaattgttttaaagaggattgcctggctgactgtgctggtcacaggaagaaggaagaggctgtcttttccatcatcagccttcaccttcaagtcacctcttcagttctaagtttgaccaagttgcagcggaaggtggttgtggcctagcagacacggtcccttgtcaggcttggcacagcttgttagtgggccaggactaaccagaatccaaaaacgagtcacacagtgtctctagtcccctccttccctgctgtccgtatcagtcagctttcatagcagaaggaaatctggtttttaaaattttgctactaactgggagactctttcgagctccccttctggactctgggctccttgggtttagtgatgattatcttggtgtcctagtagttagcttggcagctggcatagaaatatttctcagtaatgtttgctgatgtgaatgaagtgagaggtgggaggaggccagccccctttcctctttctgtctgcgtgtaacctcagggtgacgtaacactttcatccactggcttgcttgcagaaagcactcaatagggcccactacagccttagagagggctagagcactcctggggggtctgtcctcaaatgcttattaatagaattttgatacaataatgttttataatttttttttggagacagagtctcgctctgtcgccagactggagttcagtggtgcgatcttggctcactgcaacctctacctcctaggttcaagcaattctcctgcctcagcctcccaagtagttgggattacaggtgcccgccaccatgcccggctaatttttgtgcttttggtagagatgggggtttcaccatgttggcaaggctggtcttgaactcctgacctcaagtgatctgcccgcctcagcctcccagagtgctgagattacaggtgtgagccactgcgtccagcgtaatgttttattattttgataaaattctcaaaaactgcttttgtgtcaaaaataacaaagaaggaaattgaggaaaaggtacaacaaaggggcttaaggaattgctttaacaggttcagattagcaggcttctaagtgccccccagtttttctgacaatagaatcagggaactttcaaacattcagagttgagagaccttagagatcccctgggccaacctcctctattttttacagggaggggatccagagagctaaggggtttgcttcaacccatgggtgagtgagccaggtttggaggacacaggcctacaggttcttaggccactgcattctctgggttcatggtgtgtccctataaaaggccaaggaaactcgatataataggcttcgctctctctggcacttcctagcttggtccattttaatcacaagccagctggtctgagggcacgggggtatgtgccaaggaagatggtatgtgggggtagaaatgggccactggggtctggtcaggtgtgagaagaggaagtagtaggagggaggagatgagagaagaagggcctgacggacttgtattggcaccactatttgcatcaatatatgtatatatatatatcttttacagtgcacaaaggcctgcaagttctgttttgggctgaaggccccctatctgctgttaggactcctttgaggaatccttgggtgggccgtaggctcttttatcaagggtcagacaatcctatttatactttaatttctgtgtagtaagctccctgtttcaaacagtcaaagctaaaaatgtggcagctggccctagagaagtagctatcctgctcaggataagtaagtcaagggcaaaaaataccccagatgtgagcaccagaggcaggtagagctaagtcacattctgctcctctgagtgcagctgtatttgtgcacaccaggaaagagctgggggcaaggtgggggcacagggttgctgagagtaactcacacagcagtttcatttttttcaccaatttttaaaacttgccctttggtgtggatctcccagccaagtgattcagtgtcagatgaagccccgtaaggtgtgccatatagaaatgacatgtttgttctatgtgaatactactttagagacaatcctggagcttgttttcaggtaagggtccaccacttccatatttgttgttagatgtgtgttgggaaccaatctccgtgtgtatttgttgaatagaatgagtgtgcatttactcagggttcccacgccaaaagggacccagcttaaagactgttcactgccaaacctagtatttggggacagaaagactagactaaattagtaaaaagttagaattatagcctattaaaaaacaaacacatttttattgattttccaaacatacaggaaccaaactaataaagtgttgcttactggggcatctcagggaacgttccaatgaataggcaagaatgtgttccacattatccattgggtagaaactagtgctacgatgtgcttggaactgttcctttagtgtcaaaatattaccacacattttatttgctctgttaatttgtttgataaccttttcttcttagtaaaaatacagagttcagcctggtcgttgtctaaatgatctggaattcccagagtgtggacgaggggcttgattagaaaaggtattgccccgtgttaagtgtggactctcagatgagcataactgctcactcagccctatggatttcgcttacaggaaacggtagaatgcttgcatttctgaaactttgtaaattctctgtaattaaaggtgttcgtctgctgttttagtggccgttgttctacaacaaccagttgtagcttacagctatatagtgatttattacaaaacactttcttcttctccttttccttcttcctcttcctcctcctcttcttcttcctcctccatcatcatcaccggcatcatttattgaatgctactgcatgctggtccttgtgctgttttatatacattatatacattatctcatttactcttcacagctctctatggatgcagtttttctctccattctacaaatgaggaaactgaagcccagagaggttaagtgatgtattggcctaagacctcgcaggctgtaagtggcaaagctaaggccagaatctctactgtgggactctaattccaaagtattttctatgagggcattccaaagtgcagccatttttgcgaagaaaattaggaaacttgaagtgacgggtggctggtggattgttacataagccgagatgagaggcaggaatagagctggcagaagtgcttgcagaggttctgaatttcctctgcttcctggtctcttctgaagatgggtcttcctagccattacacaagtagcggggacaaccagatggtcacacaaagccaccacccactgtggaatgaatgtctaagttttccatatttaccccagtctctaatgtcctctggtgaaattttgtctttgatgggtttcattttgggcccttgttgtttttctcagatgcctttcttttccttgtgtttttcttgcttcctccggtgcttaatggcttcttcatgaagcggttggaaatctgagagattgtgtcatcctgcccggcctcgggctagacaccttctttgcctgctttttacttcctggtcagttgcttctccttatacaacttttttttttttccttttaaagcttttcacacaatccataaacacaaatttttgtttttcttaaaccatctctcatgtacatctttaatattatgtgatttccaggaatctatttcagatattccctcattttcccctataacaaaaggaatcatctttttttgactcctgtctcgatggcttgacccaactcgcctgttctaatttcctggaatgaagagagcatttcggccatctgactttatacatttctgattttgaacgactctagtgaagagagtcttcagagcaaatgtagggaaagaaacagagaaagagagagatgtgttgtggagataatatgaggggattcagagagcattatccaaatttgtcatgaagcaaatgaggaaactgagtcttgtggcgtttaaagagcttgcctgagatcacattcctaactgatcaagccagagtcagaatcagtgttccatcctaggtccatgttcctctaacaccatagcagaggaaaaatgagaaaaaacaggcaagaattcagaaagcatagcttccttttgaagattcacatgacatattagtgttcatcattgtgacttccaagtgaaagacagagttcatgttatgagatttaagaagtgaagaaagaatgcaatgtattttggaaagatatctaacaaaaatggttggcataagaataatgttaagttttaaaaggctaagcttcagttacgtggatgaatgatttatgaaaagtactcccccatgaagacacaaaagaggtagccaatgcatctgcaagttcttgaggcctgatggcctccctgggggtattttccctttgtatgtgggagtcagatatacggaaaacgacttcatttcctgaatgacccaaaaaggacgcattgccctgctgagtgccagttggtgagtgtgctcaatggtgttagtgttgccacagtgtagttccagtcaccacgtctttcgattttgacttacattttcttctgtcttatgttgttctttggttcttacctgtaaagctgacttcccttcaggagattgtaaggtgctcagaaaagggctttacctcactgccatgctgtgaattctcctaggggaagagtacagacaatggagtagacagacccatgaatcctggttcctgaacttgaacttgttcaagctacttaatcatgaacctgttaactcatctgaagtggtaataaaaatgtgtctcttagggttgttgggatatgtacattgcccaatgtagtgctttatactgttaaaaagttagttctcctcctcctttatacatcctccataacacatggatctggaagaggctagagattttctggttctgtgcccacattatacagttgagaatacagaggccaggggatggtttgtttttgtttttgtttttgagacagagtctcgctctgtcacccaggctggagtgcaatgccgagatctcagctcactgcaacctctgcctcccaggttcaagcaattctgctgcctcagcctcctgagtagctgggattacagctgtgcaccactcacctggccaatttttgtatttttggtagagacagggtttcaccatggtggccagggtggactcaaactcccgacttcaattgatcctcctgcctcggcctctgaaagtgctgggattacaggcgtgagccactgtccccggcccccggccagggatgttaatggccttgctcaagctcgtgtggctagttggtggtgccatctgaactaaaatctaggcctcccgagtcagctgactccctgcacagtgctcttgtcactgtcccattgagttgttcacagggctggggtcactcagtcagtgctcaaaaaagctcttattttaactttaattgaatacaagcctcaacaataggagagatgagccaagtgcaattatatgataatagcaaatgccttttgcatcttacagcagaattttgaaggaatagctaatgtggttctgaataagtttccagagatgaaagaaaaggaaaaaacctaagtctggaagtactgtacagtgagtctaactagcattattactcagcgctcaagtatttgaacctattcagggatctgctccttcatacagttgcttattatttgtgactggggtgagacttgaaagagagcatcaattctccagtctgcttttgtttaacaggcagttccatgtctgtctgaccacagaacagacactgtttgctgtgggctggtgaatgttcactttcaagagcagggagtagatggcccttcgtggaagtttaattatacagaagagtttgaaaaggccaagtttgttactttggggcatggggaaaccttcctctctagcagatgtgaggggaccgaagtgtctcttttcagcagttgtattcttcttgctgtggacctaaattcgatcctaagtcattctttgtatgtacatggcagatgagaagatgaactatagactggaaaataacccttttttgaggaattgtggagaaaatgttacccacctgtccctcctaccaccatgcaataagtgtgggctacttaatactcttgaagcaagagtttaggtttggagagaaactgctcctctgatcttctcctggaaaccacaagtggaagtttgtgattttcttctcagctgccctgtcccctctcccttgggttatgacaggccgtgtaactttatctttcttaggacttatctctttgatgaggtcagtaatcctgcttcacttacgtcccctatacgtaagattgccataaccaaagatgacatgcagactctaaagcatttcctggaaaaaatgagctacagatagaagtaaggctcgtaatttaaaaaatcgaaccccagagaacagcctgtctctgaagttaaccattcccccagtactttctcttgtttccctggtgaaagtgtgaatctgggttgtggcaggggaagttctggcactgctaagaggtgaggaaggaagagggagggcccagagctgcccacctcacttgcaggtgtggcctggaagagtgccggggtctctaatgaagaatcaagttcaagggatgaagaggagttggcgaaggggcacaaaaatacagctagatagaaggaatgtgttatagtattcattagtataatagggaaattagagttaacaatttattgtgtatttcaaaataactagaagaattgtactgttcctaacacaaaagaaaaatgtttgaggcaatagatatgccagctaccctgatctgatcattacacatctgcacagatatcaaaatgtcacatgtacccccaaaatatgtacaactattatatatcaacaaaaaaaatcaaagagacaatttagaataagtatggtctcaagcctagtgactaatatgtggacaagtagatctgcactagggtatacaggaggaagtattatggagacttcataaaaagggagatggggcggggcgtggtggctcacgcctgtaatcccagcactttgggaggccgaggcgggtgaatcacctgaggtcaggagttcaagaccagcctggccaacatggtgaaaccctgtctctactacaaaaattagccgggtgtggtggtaggtgcctgtaatcccagctactcgggaggctgaggcaggagaatctcttgaacctggaaggtggaggttgcagtcagctgaggttgtgccactacactccagcctgggcgacagagtgagactctgtctcaaaaaaaaaaaaaaaaaagggagatgggggacatggtgggaatttgctaagctcttttgttaactgctttaaagaactcagactagggaaggaaacttctctcaagtttattgctggttgttatttccagaccatttgtctttcccaaactgcccttggccatcaaatcagactcctgctagagtaagcctcatggtagtgtctcttggctcacctctgtggttttgctaattattttcatgtattgacctgggatcacagaccaggcacccaaagggacagaggtgagttctttttctttgggcctctttggatactcataacccaagtccctgtgacaggttttggaaaaatggcacatctgaaggattggatccgtggtgcattttgtaattgctgtatcctcttttctttaaggtcttgctgtgtcacccatgctgaactacagtggcgtgatcatagctcaccgtaacctcaaagtcctgggctcaagtgatcctcctgcctcagcctctggagtagctaggactacaggtgcaccaccttgcctggctacttttttaaaaaactttttgtggagacgaggtcttgctttgttgcccaggttgctctcagaactcctgggctcaagtgatcctcccacctcggcctcccaaactgctaggattataggcatgaaccactgtgcccagccattttgtcctcattttgacttgagatctgggagattttaaagatccgtgtcatgagttcacttgactggtgctttgcacttttgagacccgtcactctcctgactaataggtcttgacggccactaatggccagcaatggctgggaacagcaggacactctcactttgtaccttttgatctggtctttattcaaagtggggtgaacccagtaggagagttgttgttttggggataaagtctgggtgacagattcttcaggctgggtaagtctcctgttctccccgactttgagacctgaatgacctgatttggctgactacacctccagtcccctggacaacagccagctcctttgattttgtgccatttagtccttcccttcatctgctgacgctgatactttcgggtgaggtggaaggagagagcatacctgttggtgaggtaagagtgttttccttcagagaaccaaagaaacaaaggctccctttctgaattttgtgttctgcctctttgcatttctgaggctccttgtgtctggcagggctgtgagtgaggagatgagggtgtgctcctctgcaggcagaagtcagctgtaggtcagatgtggctttggaacacaatggaatccagggggaatgttggcgagcacagcaaggctggggtgatgatcctctaatcttttgcagcgtgctgtaagagtatctttaactttcgccgagacaggcagggcaatgagcaaaaggacctcggtgttaggtaacatctcaagtagggcacctggtagtacacctgtcttgcatgttcccacccttcccaacactttatctttttgaagccatctacccttagaaaatgaacaaggagccactgacatagacagcaagtatatttacttatcttttgggtgcaaggcagtttgccctgctgggagagatgtgggataaggccccagagtggaaaaaaacaaaaaaccttaaaaatgcaagaaggaagaaaggtaggtgagccagcaggtcccactgaaaggccttgttattgcagcaaagagggaagaggtgggcccagtggcacaaatcactaacattcttctgacagtcactagccagttcttctgagaatttctctgtcttgaaaaacttggtaaaatggccaaatggagcttctccgaactagggggaatgcctgtgtgtgcgttcgttgttagccatcatgttgaacagtctgatttaagggaaagttggtctgtgtacattttcatttcagctgtggtctttgaaggttcaccatggaggaggtgtgggtggatgagaatagagtcttctgcctcttggttggcttatatgtaggttataggtgaatgtgagttcacaacccccagcctatttcttatttgggtgcacttttggatgacttgcagggctgagtttgggaaaacccagttactcttcctttatgcacatatttctgccagactaaatgccaaatagataattggaaagaattttcttcgcagccctggtccccaaattggtgtctgtgattcttcctagggtctcatattatgagagtgcactccctttaatcttttgggacctcaagtggggtctgtgtggacaagattgtgcttctttgagaaacttcttgctgcacaccagccagggtaaggcaagagttagtcctgttggctgggtggttcttgggcagttgagcatgcttagcacttgagaggtttctgttataccatttgccaaaagggacatctctccgctggtcctagtgccccagggcacaaatggcaggctttaggagaaaatgcacaatttcaggttcagtctctatctgcatttgtgtgcatgaatggactaataattgcagtgcgttgaacgatttctgcatattccaacacctagaaagtagcttcctggattagggaacggttcctaggtacagctaccaaaggctcaagcttaagcaccaacactggaggttagaattagcacgctctagggaggacagcgagagggcagctgacacaatgcctttatgggctatttttagctttagtcaggcctatctggagtggcttgtgctttcttgggcaccgtcctgcatttattccagggtttgtgcttgtgactctgtttgcatatatgccacatgtatcgcatgctcatgggatgataaattgcagaaattatggcataatctgttttctagcatatagaggaaaagattacacaaaatccagccttgttgtggcgaagaaacctaacatatagatgtaaaatatatctccttggaggcctggctttgtgatgggctatgaacggattgttaaacagcaatgtgaggggctgttagcaagctgtttctaagagcatctccctggtctggtctgaaaaggtgatgtgtacatattgtacatttgagatagtttgcctgtggtgtttatatgttggtaggttgtgtgtgtgtgtgtatgtgtgtgtgtgtgtgtcttgtctgtcttcagtggtgaactgaaaaaataaagtgttgtttacgtgcttctatgttagtgtctacattccaaactgggcaatagttttctttaagctggcttaagtgaagaggtgtttggtcagccacagggtatgaatcaaccaaacttcaaaaagcttcagtgtgtttttgataacactcttaagtatttaatagctgctttaaggatttgtgccttagtgtacttggatgaataggtaaatcacctccccatcagcaaactagcgtttgggttcccacgttggcaaagcagggttcctgttatgtgtctggtcatatttgaacttcttttcacattcaggtgacatagttgaacatcagtccgtgccagtttctgctactattgggtttttaatggaagagaactctttcttgttactacgatgccatgcttctgctgtgttagcagctgctgtattgaaaaacaggtgtctcttataatcctctgactggatcagtttgctagcctggcagagtcttattgttattgtttttatttatttatttttgtcccacataagtcagaaactgccaagagatgttgatgagtgggattagtatgagaggagatggcagcttttcttggtggaggtttctgttacaagaatctaagagtcttatgaagatagggctaaataaaaccaggatacgaaccacaggggagaaccgccaaaagaagggtagtaaatgaatggttctgtcaagtcacctctctgtcattcttcaaaggccaacttaaagccagcactgccacaaaagccatccaggactaaggttagcgaacggtgacccttgtttggtccacgatgcactaacagactcttccccttgttgcttcttactgctactggaatggaagctttgggagggcaggtgtgccatcttttccagcctgccaggcagtctggtgcatactcgtctttctcctccataccggctgtcactgccttccttctggccccagacctttcagttgtctcctctctgatcttccttcctccattttgtccccacccccaacacaacttggaatgattctttgcagataaaaatgtgatcttgttactctctgtctcacaccacagtaccacagtgtagcatgaaccacagcttcttgtcacctgcaaggccctttactgcctacctttctagtatcatctccacattatgttccaaccacataatgaacttttttctcaggaggacatggtctcgctctgtggccaaggctagagtaatctcagctcactgcaaccactgccttctgggctcaggtgattctcccatctcagcctcccgagtagctgacaccacaggcacgtaccaccacactaggctaatttttgtatttttagtagagacagggtttcaccaggctggtctcaaactcctgggctcaagtgatccgcccaactcggcctcccaaagtgctgggattataggcatgagccactatgcccatcccatgtaacaaacatttatgcctggaatcttccctcgatcttctttctgcctggcagccaatttgtcattggaagtccatttctcaagcctccctgttgctgctgggcacagtgttcccccagcttattgaacttgcttctgttattggcaacaatccagttatccttgaattatcatccacactagactgaaagcctgctgaggacaggagtctgatgggttcatttttatatttccagtgtccagctcaaggtctggcacagaggacagccaatggctattaattgaatagaatttcttaatcagtaggtatttattaagcttctgttacggacttaattggtgccaggctctttgatatgtaagataaagacctcacacagttgacatcctgagcaaatactctgtgagggttgaggaaagaagaaaggtagagacctgtgttttgaaacatatcaggactccatgtcagggcgaacatactgccacctcccatacctaaggggctcctgtgaggcataagtactgacatgtacacacagggcactcacaaatgctctccttctcagttgcctactttctagaggggaatatagatagctggagaagaagcttgagaaccttcaggctggatgtgccagaaacagcagagacagcccaagataaatgaatgtattaactgatcatccttttttttgatgtggctcaggatgcctcttgggtcagggagagagaaccagtggctgtttgttgtagctgtgtgcggtcttggccatagctggctgtggtatctgggacccagtggcaggtcaccaccgtatggggctgccagttgctcccccaccccattcctctaagagctagtagggagagagaacccggaagagcagcacggcttgctgaaacttctctgaggtctgtgattggcctttccatgtcaagggaagaatccctctcttacttgagtcagctctttccagtcttctcttgtacagcccatgttctctcctaccctatctgagatgaagatctctctggagctctcattttactcctaatgggttgcctggagggactaaaccagtgagaatgactgggcatactatgggactagaaaaacaactcaaagttatgtcttacggatggtaggacagcctcaatattgctgtttacagtggatagcccagtgacatttatttaaagagggcagtcttaagagagtgtgttagggttatgaatctgattaagtgtgatctgataagtgggaaatggaccacttgggagaaatcaggttactttcagatataagcagaccaaactgggccttccacacaagcctgaatagctcgttttctccctatttctgttgccattgaggtacagctgggattcagggcattaggatatgtgaaaacttttagcttcctgaacccaaccagaccccagcaagagtccttttacagtttccccgaaaccgtcacaagttttcctgaccgcctgctgggggctttctgttgcagacctacgcggcagctgcctgccagccctgccagatttgacttcatcttggctgccggtgggtcagtctccacgaggcttctcttggcctgtctgtccactcagggcatttaagggtcctcttgctttgctcacatgggctcctcgagggcttgtgcagtaggttgagagttgttacgggtgctgatctggaccacttagggagcagaaagcataggtctgtatatgaatgtgaaaatacacatttaagaagctgctcaggtaggggcagccacggaagttgtgctccctcttaaacactcagcgtacacacctcatcctcagacaatgtgctgcttacatttccagtgtccagcacggtgcctggcacagaggaaggccgatggatagtagttgaacagaatttttttaatcatcaggtctttattaagcttctattatggacttcaagtttcctccatgaatgctaccagaacccttgctcaatgtcttcactgttgaggctgttgagtgagaagccatttccttccccttctacttcccctccctttacagccttaccaggcccagtgttcagaggactcgatgctcatgaacctagggttcctaagaattagcatgtcacaatctaatctggagactatccgccatttagttccatggcggattatggtcttggttctagcaacctgctgaagaacaaacctggtggtttattttcttttttttttttttaaatggggacttgccttgtctcccaggcttgagtacggtggcatgatcatagctcactgcctcgacctcctgggctccagcgatcctcccacctcagcttcccaagtagctgaggctacaggtgtgtgccacgatacctggctaattttttttttttttttttttttttgagatggagtctcactcggccgcccaggctggagtgtagtggcatggtctcggcttactgcagcctccgcctcccaggctcaagcagttccttgcctcggcctcccgtgtagctgggattacaggtgcacgctgccacgcccagctaaattttgtatttttagcagagacagagtttcaccatcttggccaggctggtcttgaactcctgacctcgcgatccacccgcttcggcctcccaaagtgctgggattacagccgtgagccaccacgcccagccaatttttaaattttttgtggagacaaggtctcactatgttgcctggctggtcttgaactcctggactcaagtgatcctccagcctcagcctcccaaattgctgggatcacaggtgtgaaccgccacacccagctgagaacagacttttgaactaccacaactataggtctgttggacattgttttcagttgaaattgcttaaaaattgacctgccttggagaaaatttcatgagccttttcttaaagagtgattgaaatgccaataagaatgcaataacaagtgccctgtgtagatgtgtgggagggacaccctccccttcctccacccagcaaaagctaacgtactttccaaattctaaattgtgatgtgtgacttggtaaaggacttcgcactgttttgttttttttttttaaattgatgtggcaagccttacaaaaggatatgccgttatattctaacaaattatttctatcgaaaagagtatcatgtgagattagggctgtagaggaacagcctttcaactagtcttctatgtggtaaaggtggcacccagtttccaaagacagcacagacgccaagggtcttttctgaacttcttcgatttttatgatccctggctgggtcggagaagggctagttagtatgtttttctttcttctggatgaaagttgcaaggacacttaagccttatgcttcagggcggaatctgatcacaagttgagatcaggaagaaattttccccctgtggcttcctattgcacaattgcccggccaggtgtgctacctctgttaaacaaagacacacacaagtgcacacctccttactggctatcttcagagcaggatgttggacgttgtgggccagcagactggttcctttggcacatccctgtgctcaaagatgggaggcagctgcccgtctgctcctgtacttggctgtcctctgggtgtgctgtactgagctcagggccacgtcttcagatccctacaactctttgcaactcttactttgtgggacaattaaaattaggtctaattctgtacacacccgcatgcacatgcacacatatctttttaaaagttttccttaaacttgcttcccctttcctgggctttgcttcccccttcccgggctttacaccacatcaaacctatatgcattcccaaaacatcaaaatgactgttcacaaatcatagtagaactctttaaccataaggtgcgcagttgccaatctcaagcttggattgtaagcgacttcgaagtctgatccaaaagactgtgggaggagggggaaggaacatggatggacttctttccttcctccctccctccctcctttcctcccgtcctcctgtcctcccttcctcccttcctccctccctccctccctcctttcctcctttcctcccttcctccttcctttcttcctttcttccctttcttttctctcttttctttctttcctttcttctttttgaggcctcggctgtgctgcctcttgtgcaataggataattaccagcgattcccaggctcgcctgcttttctgcctttacatctctatctcctgtggcgcagtacttccttctgcctctattattagcttacttagctttaccattcagttctccacctcctccccgggtccctccccatcttcttccagcctttctttcccttcacctctgtaaaggtattttggggagctaccattcatgttctgttcatacaggaaccctctttttctttattaatataaaataatcttggtcctgcctcattttatcatatattcattcgtattcccaaaatagaaaccgtcgccaccagcacgtaatgtctggcctgtaaacctttaaagtaggatgtgccgaaatgagatcttcacaagcaggtgtgcctcatcccctgacctgcaggcccttcttccccggcggccattcactcatcttcacaccatcttcttgcccttctctctgcttttcgatgattctaccccaatcacattccttcccaaaatgactgtgttagtacttaattgttcacctgggcttgttcatgttgtagttcatcgtttcctttttatctttaaaattttcttgttcttcggggatacactgtattcttgtaattagagattatatcagttttcatggccaaaatttgccacgtggacataatagtatttggtatcaagcacgcctttcaggaagaagggaaaaacagtagattttgggcagcttttgattacaataatttcaaatttctaataactaagaagtacttcatgtgattcttgtagagtaaaagcttaaaaattacccttttctttgtaagtgatatgagtcttacttcgtttgggtaagaaactcagtttgaggctaccaatttttcaaatagtggtcttagaaactaattattgctgtaatttcaataactaaataggcattcctattcaaacctttactcaagtagttatattctttaactatagttactcatttgtaacatttttcactgtaagggtagtgacatcctgtttgtaacacaccctgtcctgggactaaatggaagggattgaggaaattctgctggagtctaaccccaccatagggcagcagcattttaggaacaaaagcagagaagctcacactcttctgagtataactggggagaagatttagggaggtggcttgtaggatcagttttaagaccaggtcagacatacgtacaaattctttctttgtaaatgagaagtggcctttaatagctttcatatggatagatgggtagatgaaatattattctacctaaagcatgacatttcagtaagtactacactttgaaacttgccttgcagggttttaaaaatattcttttctgggttctaatcatttataacgaagagtcactagcattttattaaaacccatattttttggagagggatattaagtgagcagggattgtgggttgttcttgcttttccttaactgtcctgccccaaaaaagtgatgggaataacccaaaccttaaaggttcctggggctttctttttccctagacagggacctcctcctctcccctgctctcatcccacttgttcctgaaaaagggtaaggttggcagggcggggaagagagaaggaaattagggttctagcttaaaactgctgctagagtggctagttctgggagctttttgagagaggcccaaggtggcagccttgtctcttttgcctctttcattaaacctggggtttgctgtacaatgctttgggtctcctgtcccaaaaataaagggctgtggcaagtatcatcctgacaactatccaatcagttctgactgagaggcacttgtaattcagaagatagtcattagatttggatagaaagaaatgagatgtgatgttcagtagatcagtagggtgactatagttcatgttaatcgattgtacattttaaaattgcttaaggagaataatttgaatgtttctagtataaaggaaagagaaatatttaaggcgatggatataccagttaacttgatttgattataaatgtatcaaatcattacatgtaccctgaaaatatgtacatctaatatgtatcaataaaaataaataaattcattagaataacagaatttagacatttagagctatagttttaaggaatttcagaccaaggcccaaagctcggttaagtgacctactgaaggtcccaaggctattattgccatattagaactagaagtcagatctcctgactcccaccagtgtatattgacttttgacccagcagttagttttattttaggctgtattttcgaaataacagattggttcaagtcaaaataatcttattcgtgtgaaaaactcaaccaggtgaactgagtgaatgaacctactttttaattgggtgtttttaggtcatgtgaaaaaaaaaaacacaaatcagaaggtcctttgtgcttcatgtttggatctgatccttttttttttttttaagctgaaaatgaatgaaggatggtagagtaggaactaggatgtacgcataaaacacttgcctgtctgccttgtcacctgcactccagtggggtgtttccagggctcattgtaaggtgagaggtgacttctggacccttgactaccctgttccttctgtcgcaaaatataatcaggaggtttctatttgacaatgtactctgagtattgtaaggaaccaactcccaacccaaatcgaatcgcctctgagatcctattaaacagaaaatgccctgaacaccagtatatgaaaatgctttgctaggatgagctcaaagcatttcatcctccaaataaaatctatctgctcacacttagattgttcaaaggcagatggtaggcaattgaaacagagagacaagctggcaaaaggaaaaataaaaccacaaatatctgcacgtgaaggtgatttacgctcttgccagcccccctcctaacttcgttaacacaacgacgtagcaattaagtagcatgggaactcgggctcagatggctgatacagttgtcctccgttaatggggtgagacaaagcttgcgtataatatacagtgctcttcaccaaaatgcagagctaaaagagattttaagagataatcagcaacatagcctgtaaatcatgctgctcataacagacggccaccttactgaaatctcactgacccccaccacacgtgttaacagcagggccactgctctgaaatattagctattaccgagtggccaagtcttaagaaagggaccacttggcagtattgaacttcaaagtggaagtaagatccccttggggtgagggtaggaaggcggtgaacagggttgatcagaaccgtggaagagtccggagcagatgctctgtgggaaaccctgaattagccaagagcaaaagttatcgccatcctactgctctgggaaggctgcctgttggagaaaacctctgtgttcccttagccttttcactgactggaggactttccagacgaaatctggcacttctcagtaaccttgaacttgaacattcagtgacagaagggaaagggagagggtttcagctgctggagctgggtaactgtgcagggctctcgcagcgggccatttgtggctctgagggtgccaagctgcagtgttctgagggtgtgtgaatgagggtgttgatcctggctgcagaaggggcagctttctgagcaggtgggagtggtgaatgaggaggggatttggcggggcaggatgtgagatgagtttactctgctgggaaagaatttggagatgtccatgaagaagaaaatctggatgactattgagggagggctgatgttggagagaagggctcatactacaaatcagaataaaataaaggatatcttagtatcaagaggaaagcactgttaagatactaaaccttctgctgcccaggtatctgaggagagaccatggaagagttctatatggaacaaatgaaaaagcagtaaagtcaggtctagacctggagtttttagtaataccaagtttacataggaagtgtctgggaagtagtgattagagggaaagtatgttggatgagtgaatcattccttcagaaatcaatattttttcctactaggccctccgaatgtcatctttgtagttgcccaaatacatcagtttctctcttatgtaagagagcttgtctcatttttattgctgtattccattttcaagtgtcttcttgggtaatgatcctgtatttgatcttggccagatattatctgtgactgttgttagagtgatccttttcctttcccccgagttagtcaaactgtgtgcgtggtctctagactgagatttggcagtgattccatggctcttgtgagtggagttgactaacaaaactcaggaatggaatggccatattttggaatttggttgaagcaagtaaagtttttattcttctaccaatgcaaatctatctcagggaatttctctttattcagaaagaatgacctccatcccacctttctctaaaaggtacaaatcgtaatgcatatttgacacattagttggcttttaccttggggaccagcagaccaccccgcagatacaatgcacggaatctagcaaacaataaagagcagtgtgctcgcgtggccagatcgttcgcttccttcctttttcgccttcatttttgggaagtccttgcctcgttagttccataggccatgagacatagcaatataaaatgccagaggatgttcaaatgggcgtgtggaggaagagggaaagcaggaattctgggccaaagagcagatggccagccagtgacctaggaagggaagctcaggcttttaaacaatggcaatgtttcttttatgtgcagttttcattaaggagtaccgagactccaagttggaggattctgaaagtggtcatagagtccctgccctcgagatttaatatccaaagaggagacagtggttttaatataatgaatatatgcagaaaacagccggagacaatagaaacactttggcaccttctgtggcgctgctaaaatgtgtgctgtagctcaaggcccataggggttaatgtaggggttatttgtgtgtgtgtgtgtgtgtgtgtgtgtgtgtgtgtgtgtgtgtgtgtttggtgttttccccatgaagccctgattgtgcgaccctgggtgagccagctgcttccgctgttttccaggaaagcatgagtgtccaccacctagagagatgatgatgtgagaaggggcagggagagacctctctggctgccactctctcactgccccaggagcggaggcccctggtgctcaggagttctttggctgtgtccggatccaccaattccccgcttccctaaggatgacgggtaaatctggtgagacccgctgccctcctaatgttggaggaaagctggagcccctcagtcaacatttatggaagggatttaatgcatcatgggctgtgaaggtacagccaggccctccgtcagctccctgagacaggccttgtctttttgcacgcatatgtctgttaatagttgtagacctagctgtagccatgggggtaagcctagtcctccagcccctgagagtttattaccacaaggagtgagaacaccaggatgtgtttttttagatgttcttctgtaacccccaagcacctgtagctcccaggtgtttttacattgatctcagaattacccagaaaacattctttgaagaccttgtagagtctgccatttgtacttctgctacaaagagcaaaaataaagcaaataaacaaaaagcccctggaaatcctatagttatcctaatacatattttaaagtattacctatcactgagcaagtgcatctatacatttcaatccttttggaaaatatactttctcaaacttcatgttgtatccctctaaagttagttagcacatattgtacattcagaagaaatgttcatttacagcaaggcataggttttttttcctctaaaagaaatttgaccaggtatggtggctcatgcttatattctcaacattttaggaggccaaggcaggaggatcacttgaagccaggagttctagactatcctgagcaacaaagtgagaccctgtctctataaaaaaataaaataaattagctggatgtggtaatgtgtgcctgtagtcccagttacccaggaggctggggcagtaggatcccctgagtctaggagtttgaggctgcagtgagctatgatcatgccactgtacttcacgctgggcaacagagtgagacctctgtctctaaacaaaaaggaaggaaggaaagagggaagaaaggaagggaagagagagagaaggaaaggaagggagagggagaaggagggaaaagaaaaagggagagaaattgatgcaggaagaagaaagaaagaaaataaaagaaagggaaagaaactgatgaaggaggaactgggtacctagaagtggttgaatgaaataatcctgtaaagtcatctaaggttcccatctcattccttgccttttatttcttgccatcacctatggccacttcttgcttgttcatgtcactttctttgtcagtttggaatgggccctgcctggctgatggctttggagaggacagcagacagtcattagagactagaagctgccaagcgaggcaacgtgacagagcacacagctttatgcctttttcttagtctactctcagcttggaaatgtaggagttatagtgacacagctcagtcagcctcttcctcccccgatcctggatcatccactctgcctctccctcccccagtcccagatcatcctgttttcctagaccattccttgccctgacaaatttctattactctcaggttaaagcccaactaaccctgaccaggctgcaaggccctgcgtgatctggccctgtcccttgctctttgtcttggactgcccttgcccacaccaactccttagcattctacagaggtgccatcctcttctctcctggcctttgcccatgccactccctgaaacactccttctatctctcttatcccagctgatggctctttcctaggtcttatctccctggggtcttttcttgaactcctcaaatctggatgagatgtccctcatatgtgccctcatgacatccgttttgaaacttctatcacatcaccttgtttgtatgcatcatttgtcaataagcccacgagatcagagcccatcttggttttgagcttatgaacatagtgttgggagtaggtttggtgctccataaatatctgttgattgaaggagtgcgtggaaaacagaatttggtctttgatttttttctgtgtttggctcagtgtctgatgctctcccgagcattcttatcagtccacaggattttgcaggactattagcagagggtaatgcatatctgcaatattgtcagacatcgcctgttgttagacgtttgcttatgcagggaaaacaatatggagtttttaatttttagttggaaattcagaatattaagttacacataacctgcagtggtttggtttttaaattgagtttctgcttgttgttaaacccaatccgaatcaactaaagggaggtctattctctctacaaggacactgtggctctctggatattcctgtaagacaggaaaaacgatcacagatcaattctagttgctgcctctgagaaagaagaacaagatagatgggtctggctttgtgaggaacctttctctctctcctccctcctcctgcctctctctctgccaataattacaaagctgaactgaactgctactgagaatccaagttctttcctggctctgactaagagaacatagatagcatatgcatctagattctttggctgtatacggacatatatacatgcacacacatacactctgtctttggcctgaaatgacggcactgcactaagacctgttgtttgtttcttaagcagatggatggctagatttttctttatatgaatctttcatgattacttttactaggacagagctaaaagaacatgggatgtgaagtccagtgagttggattgattggatgtatgcgtattgagcacctgttacatgctggacattatcagaattatccgggtgaagaagatgaggcctctgattgaagtggcttgctgtgtaatgtggttacactagtgccacttactctataactttggcggacaaattactggacctctttaaacttcccattgcttaaccgtaaaatgaggatagtagcacctactttatagtgtttccaagagcatctaccatgataatgtttgtaaaattcacttgacatacacctgctcatccttgacatctcccagtgcagtcaccggagcgcctcccagcgtcctctggcacaggtaggtgcttcccctcgtgcagttctctgcttggacacttcactccgtgctgtcagcaccctttgcttctgttcctgcacttgtgccaaaccctttggatgaagagcctcgttgtgcccatctctggattcctagtgccaagcatggggtccagcacttgacacatggctgttgctgaataaattaaagaacaaggattatggatggccaggtaccatgcatataacatccttattataagaactttgggccagaaaacagaacaaaaagggagagtgctttgaggccctggagatcagagcaaatctcggcaatatcacgctccaatttgaaggctgtaagtgtgtgctgctttttagcatggatgctgatcaactgcccgaggtaaaggaacctcttgaggtcaggaaggaggtctgtatgtttagtctggaggtcagtctacattttggttagctaacaaaactaacagacctaggtggttggcaattagaggcgcattttgattgttttatgccatatactctacaactcacatggcagcacttttttcctcctgatttcctttccctttgcaggaagaaatgtgtttctccttttcttggaatctccttattttctgctccgattatatcccttttttctgctgttcatacaatttcaagaattaatatgagttatgagggttctccagagaaacagaaccacaaggagataatgtatttatttattatgagaaattggctcacgtgattatggagactgagaagtcccatgatctgccatctgcaagttggagacccaggaaagccactggtgtcattcaatcagagtccaaaggcctgagaaccaggggaattgatggtataaatatatcccagtttggggattggagaagatgagatgagatgtcccaatgtaagctgtgaggcaggggaaaaaaagggagtgactggtgaattcttccttcctctgcgtcttgttcttgttctgttcaggcccataatggattagatagtgcccacccacattggggagggagactgctttactgttcaggagctaatctctccggaaacaccctcctagacacacccagaaataatgtgtaatctgggcaccccataatccgagtcaaattgacatataaaattaaccatcacagatattaatgtcattgaggttgaaaggagagtgttcttgtccttagtgtgtgtttgtgtaaatacaatttctaacacaatctgagtgtgcaggaaataaggaataagcactttaggggaaaagatcatgtctcaaaggatcatttttttttctttacccacccctttgactctcagcattgaaatcaaagtaaggccctgagcagctatatagtagaagaaagaaagaaaaaagtaagaccagatggttgtttggaaagaaacagccactcttagcagttatgcacagcataggtagagtaagttcttagtgctcgataaatgaatcaatggttgcactttttagaaagaccatttcttcttcggtaaagcttgctagttcttctcacagattctcttttcatccgttccataggttctgcacactggtgaagggtaggaacagagtgatcttttctttccttcttgctgggtttgccacaaagcatgttgaatggtcttgatgtttctccggtctataaataaatacttttttaaatggagccatcatgggatctgactctatttattcttgtcactctcttctctcctcccacagggaaatggcacatttaggaagagtttccattatttgtaacatttgatgatttgtgtctttcatagaccatgtatcagaggtggagaaacagcttcttaactttcagacttgcttgttcttgactccatgagccatctaggagagttaccccatttctgtaggcatccatcagtattcatcctctgtgttcacacgctttctcattatattactcttctcaagtttacaaatctcttctcattgatttcattttagtttggcatcatggtctagtgagactaacacttggctgggaattgggactaactgtgtccttggataagactcttaccattctgggcttgtagtttttctctgtaaaagttgagacatccagcttgatagttctctggctataagggcattttgacctccgaatactgaaaggatgcaggtaggggttgcaatctttcatgctctgtactttgcaagagtaatttggtcagctatctgaggcattcccatgagaaccaaatggaactactctggccccttcagatagaaactgttagaaataaaaagcttacacttgttggggggcaggcagtatattttacatctgctgataatatgctagaaccaaattgcaaagtgtacccatgtatgttatttagtattttcattgttcacatttttctcatttctaaactatgttgaatagtggaatattttgcttcctttggttttgtttgagaacctcttctccccttagtgatggtgctgtagctgtcgtcagcccaaaaggtccatactacatgttcagctaggacagggaccacatcagggcaggcatctcatataatttgactcagccctaatacactgattttcttacagccaaggattaactctctccattaaagactcatgtgaggggaagaacagatagcaaagtgtttgctaaaatgatgaactgtccctatttcaccttcaggcagcaaaatcatctgcttagaaactaattagagcattttccccaggcgttggtgatctacttctacatgcctatgatctcttagacagtagttgtaccatgttcaggaactggccataaagcagccctctccctagcctgtctccctctaatagaagaaggctgagagtggctcattccttcagatgaatctcagaccttttatttcagattcatttaagggcatttacttctctgtgatgctccttactttctgttctttaaaatcttctttgcttttggatcccagggtagacaaggaaaatgttgcaccatcatatataggtaggtaggagactttaaggtgctcaaagcctggtcgacattttctggtggcacagatgaagccattttctatggaagcctcctaggcaagactctgtcctgcatcccactgagtatagacctaatttctttctaatatggatggaggaataagcatggtcatttatcatgctgaggcagctgtaagccgtctgcatccgggttccattgcaattggaacagtagcaaatccattgggtttctttgtttttcagggtaattttctttcccttacagtgtactacagatttggggtctgtggtcttaagtgaacatttacataaagttagctatttatgattttaaacaaatttcatgcccctttctgctgtgttgttggtatttttggtttctatgtatcataaaccacagaagttcagtgacttccatggaatgatgtggaaaatcaggaagtaagactgaaattaagaatgaaaatttctgactatatgtgtcatgctcattttcaccgtttaaggtctttcagaccacaatttagtgaataaatctatatagcaaattttttaaattctcacgttttatttattattattattatcatttattattatactttaagttctgggatacatgtgcagaatgtgcaggtttgttacataggtatacacgtgccatggtagtttgctgcacccatcagcccgtcatctacattaggtatttctccttatgctatttctctcctagcccccacccactgacaggccccagtgtgtgatgttcccctccgtgtccatgtgttctcatgttcaactcccatttatgagtgagaacatgcagtgttaggctttctgttcctgtgttagtttgctgagaatgatggtttccagcttcaaccatgttcctgcaaaggacatgagctcatccttttttatggctgcatagtattccgtggtatatatgtgccatattttctttatccagtctatcattgatgaacatttgggttggttccaagtctttgctattgtgaacagtgtcacaataaacatacgtgtgcatgtgtctttatagtagaatgatttattaccctttgggtatatacctagtaatgggattgctgggtcaaatggtatttctggttctagatccttgaggaatcgccgcactgtccacaatggttgaactaatttacactcccaccaacagtgtaaaagcattcctatttctccacatcctctccagcatcttttgtttcctgactttttaatgatcgccattctaactggtgtgagatggtatctcattgtggttttgatttgcatttctgtaatgaccagtgatgatgagctttttttcgtatgtttgttgaccgcataaatgtcttcttttgagaagtgtctgttcatatcctttgcctacttttagatggggttgttttttccttgtaaatttgttttaagttccttctagattctggatattagccctttgtcagatggatagattgcaaaaattttctcctgctctgtaggttgtctgctcactctaatgatagtttcttttgctgagcagaagctctttagtttaattagatcccatttgtcaattttggcttttgttgccatgcttttggagttttagtcataaagtctttgcccatgcctatgacctgaatggtattgcctaggttttcttcaagggtttttatggttttataggtttttatggacctaaaaccataaaaagtctttaatccatcttgagttaatttttgtataaggtgtaaggaaggggtttcagttttctgcatatggctagccagttttcccaacacaacttattaaatagggaatcctttccccattgcttgtttttgtcaggtttgtcaaagatcagatggttctagtcgtgtggtgttatttctgaggcctctgttctgttcattgttctatatatcagttttggtaccagtaccatgcttatacagcatatttttgtttgcactttcattgtgaatgctaattgtttttacttaaagattcctccttgagtagattcaataattcaaactggacatgaacatgtgactttttgagatggaatcgctctctcgcccaggcttgaatgcagtggattgatctctgctcactacacccaggttcaagcaattctcttgcctcagcctcccaaatagtggggattacaggcgcgctccaccatgcctggctgatttttgtatttttagtagagacggggttttgccatgttggccaggctggtcttgatcccctgacctcaagtgatccgccagccttggcctttcaaagtgctgggattacaggcatgagctactgagccaggccatgtttgaatttttacaagactaatttaatttcacatttcataggtaacacatagacttagccacatttttcatattggtgcctccatggtagataagacattgaaactataatgcaactaagatcaaattttttaaatgtcagaataactttaataaataaatttgctcatccttttttgatggaccctaacaatgatcagtttttagccatgatgttatctgccactagactgtattattttctcatttaacatagcttcatggtactaggaatggaaggaggaaagggggcatgaacttctcaagactgctttgtaagtctatttctttctttgattcccatacctcaaggaactgagagcaaactttgagcctgagtgtaaagtttgttttcctggaaatgtcaccaggctgtaaactcagaaacagattgcccccaaaaaattccctaaagggctctttacttttttcttgtgttacctttttttcctgtggcattctgtctcataatatgaacctcatatagttgcctcccaaacttttctgtttagcttttttttttctctccaagaggaatttctttaagtacactatggaaatgtgcataaagatgaaagcctgacttttctaaacactgtgttataaaattaattgacaattaattcaacagatgtgtattgccacatggatagagggtaaaggtagtcatttgtcactgacttcgacaactgagaaaaaagtgattcaagggagttggccctgcatgtaaggaatttcaggaacaatgtggtcaattaattttacttaagatgaatgtaaacatcatgtgtacatgcagttctttcaataaatacaaaataattgtaaatgataaagtggcagataaatcttagtggcagataaaccagtgcctctaacaatccgcttctgccctgtggcattttttgaaatgttactaatttgacagactaaatgagcatccagtattatttagcttttaaaacatattatttgtgtttttttcctttaatattttgcttagaaagtctttctctactctaaggtcaaataaatgttcagttaaatagatggaatattacctgtttcatttttacattcaggccttaagattttattagagaaacttccacacatattcagaagtgatgagaacagtataatgaattatatgtactcatcactcggcttcaacagtgatcactacgtgactaatcttgttttatctgtatgcttacatccttctcacccttccccttccctattattttgaagtactagtcactcagaatttcagctataaatacttcaggttgtgtctttaacagacttaaaaaccaagcaagcaaaatgtcattattacacctaataaagctaacggtcatgttttcatattatctaattaatacctagagttcaaataaaatgcctagtatttttggggctgaagatacaacccataaaagtaaagccttggtgttataatacccaagagccaatattctaacgtgaggaaacagacaaaatgtaagtaaaatacgaacaagataatttctgctaacaatcagtgctcggaaagaaacacagtagatgacagagagagtgacgcagggccagggggatcctattccaggtcggtggtcagggaaggcctaggaggtggcatgagtgtgaggaccaggtgaagggcaggagctggcccaggggacagtgtcctaagtggagggatttgccactgcgtgaagagcttgatgggcctgcggagtgtcatctagctaggcacctttttccctgttaatgctggctttagttatagtcatttgtaatgtgtagattttcagtgtcttaacttttcaacagggtaaataggaccatccggagtacaccaatattgagctttgtgataccttttggtcgatttgttgatcagttatgcttcattgtccatgaacatttcagaaaaaaaaaaaaaaaggaaaaaaagaaatggaaaattcaggctacttaaatcacgcctttgaaacctagaaacccttaggggcacagacccttcttgtgtaataacagagctctattttctgctgggaagttccctattgagatttgggacacttcctaattttttctgggtaaaataaaagtgacaacttttttttctaatgactttttaatacttcttcttatctgagtaaaaaccaggaagtgggaagcaaatgtacaaaaaccagcaatacacacacacgtgtgtgtgtattttcatgtacatatgaatgtgtatgtgggtgataggaagaagagaggatgcatagagaagatgatctcgatcaagtttgatgtaaatgtaatagcaaattagagtacattcttgtcttaatcttttctgtaataaagataaaatggggcattatgttcatatgattgaacaaaagtggatgatttcaacctttttcttctcagccattaaaagaagaatttgaaagaaacagtctttgcatacatatacagagagtttgtcagcctttcttcagacacagccagccacagtcagactaaacattcgaagacgttacatttagtccacagtggaagtatttgttgattcacatattttctttttacaagaaaatcttcagggttagtattcacccctgaattggacacaaagtaaaattccattgtgttataagacagcttaaaatatctttgatttaatccagaaaattctatcactcttactcctgaaaaaggtgctggtattttaggctttaccagtcagctacattaaaagctgtggatagttttgcaatttatgaaataattactcttcctcatttgtcttcttgatttgcccgacatcaatgctcttgtgttcaccagggactaatgattgtatttttcttcccagtgggtgggataggataccagtaggtgggatagagagtttatggtagattcagtttgtctttatttactcaagcactcttccagggcctggagctgtcaaaggtgaagtaggaaattactgtttacatctgtcgggaattcactgttctgtctttcatgagctttcatgccctttagagaccattttgcacaccttgattgtcagaaaagggtctgggatgtttttggagtggtacagagatgcatacagcaacttacactgtcatgactttttttttgagatgcagtctcgctctgttgcctaggctggagtgcagtggcgtgatcttggctcactgcaacctctgcctcccaggttcaagtcattctcctgcctcagcctcccgaatatatgggactacaggcatgtgccgccacacctggctgatttttgtatttttagtagagatggggtttcaccatttggccaggctggtctcgaacccctgacctcaagtgattggcctcccacagtgctggtattaacaggcgtgagccaccgcacctggccctgctatgactttcaatgctctgttgtagttttttcttaaaatttaagtttgcttggcaatacctttttttttctttcttttctattttagacagagtgtaactctcacccaggctggaatgcagtggcaaaatctcagcttactgcaatctccgccttccaggttcaagtgattctcctgcctctgcctcctgagtatctgggactacaggcgcacaccactgcacccagctgatttttgtatttttagtagagacggggtttcaccatgttggtgaggctggtctcaaaactcctgacctcaaatgatctgctagccttggctttccaaagtggtgggatttaaaggcatgagccactgccccccaccccaccgccccaccttttttctgttcttttttttttttttttcagctcactgcaacctccggctccccgctccccacgccccccaccaggttcaaacgattctcctgcttcagcctcccaagtagctgggattataggcacatgtcaccatgcccggctaatttttgtatttttagtaaaaacgaggtttcaccatgttggccaggctggtctcaaaactcctgaattcagatgatccacccgcgtcggcctcccaaagtgccgacattacaggcgtgacccgcacccagcgccacaccccctttttttcttaataagaaaatgagtagacacatccctgggtgccaatcactcatgtatcaagattgctgagtatgagaaatcagtaaattaatatgaagaacttaaaacacagttctagccaaagtaatgcttaataagtacagtattgtgcaattattgctaaatagcatacatttattgtgttcctccatttaagatactttcaagcattgtagggaaagaaaagcacataagctgtagtctttagctttaacggacttgtagcctagttgagagaagccatatgtgtaagatgacgagtaatagcacaaagcagtgtgtgatcagtgccaaatgcaaatatgtactaaaggagtttaaagcacagagaaagtttgctgtgaactggaataatgataacaatggtagcaacagcagccagcatttactgagtgcttcccgtgtgctaagtactgatcaagtctcttacaggtattcgctcatttattctttatgtcagccatataagaaagatgtttctattagttttcctgctttacagctcagaaaactgagtgaggttagctaacaggcccagggtcccacaccagggaaatgtggagtctgggctgcctgttagagtcttggctgcctgactccagagccccagtcttagccacgtcagggtggtctaggagaactggatcgaagtagataccttacgggcaaaggaagccgaccacctcatggaagagtctggtgtatacaggaaaagagtgaaaggtacaatgttggggcatgattaaagggcctttagcccccgttaaaggcactttgacctgatccagaaagtagtgggagaaccagcgaatgaacttagcaagaggaatgttgggtgcattgcagggcagccactatggctcaagttggggctttctgatgctttctgcttcagtctcgtggctgtctagtggtttgattttccattagccctttctcccttggccttaagggatggatatctacaaaatcttagctatcaggcaaaacctcactgtcccactggtgataagctgggcttcccagcagttcatacgaggcctgcatcctgctgtgtaacctgcctcaagactgcagaaggcagagttaggtgtccttccccctcagggccctctttatgcttctctggatttggtgccaaagaatccacagtttagggcaaccgtagaaaccccaggaggagtgtggtagcgtgtggagaccctactaagataaccatagccttagctgctccttgaggtctggctctgggtcccaggggctgcttagaaggatccttagtgatcccctggtcaggacatcatatgtttagagagcaaggttagaggagttaccacagttttcttctacatgctgattaatctaggatttaaatacaggctccaaaataaagtgtaagtggtggtagctcaaagaagcaaagcaagcttcacattaaatgacatgggcttctgaaaatgtgggaaggactaggaacacaggctacttactgcatctataactctctttagacaaagaaaatatgtgattaggaaatgttttggcaagatctcaccaagattatttactgcaaaggaggcccaggactcagcctggcagggaaaatggggcgggggggcgggagtgtttactgggagtatggaagagcattttaaagtatggaagtagattgaacccctgtgctggggctggggacagggagtaccataatacaattttatgctgttaggggatctctgcaaaacctagagtaagtagaggaaggagtctgtttgaaattaggaatagtagggtcagggtccagatggaggtggggaggagtggggctcagacctgaccactgcttctctaggcgtcgtttgaatatttaaagacaaagcacagtacatttgctattttattttattttatttcattttatttcatttcattttaaaccatggctaactcttctccagtcttctccaggagaaaaaacttgattgtcatcctggcacaaaaatgtccacagttaggctaacaggcaagcttccgtgagcagatcaaatttgctattctggttccaacatttaactccctagctttttttaaaagaaaaaataagctggcatcaactgaaatttcaggttaggggcttggtttgaggatgtttggggaagcgggagctttctgccatgtcttttgtggacattggatgtatttccgcattctggttggccacatttccccctggggcagattcttcagaatcatttgtctcccactgggagtctttttccctcccccccccccccacccccctttgtctttttctctgacatctgccgcacactctctccagggcatacggtccagaccctcctgggagagcttcatctgcttagtataacttctagcagaagatagaactgatggattttcgtgcgcaaatacagattcacaagggtgttcggtgtcacaagcatggatttatgatgcagtttgaaaagggtcagaatattcagagatgagattaatgccagcccatgagtgctttgtggtgctgaggtaactgaagtgcatctggtggtgtccagagctcaagtccccactgcagacgccaggaagaaagaggtggctcgcagactgagaaggggcgtagggatgcacccttcttgtctccttctgcttgataatttagatagaggatggcaggtgtaaatcagtttgtggtagatgcagtgtgagctgtcctttctcccccttcctcacgtccttacaagacacctgtctgctttgtatcgattccggcactgtgttatgatattcttgtagtttcatttttttgttgtttctcttttgatattggactttatatgcaaagaatgggattagtcataatctttacttcaaaacacattatcttcatatttttatgctggttgtgatggcacacacctgtagtctgagctactctggagactgaggtgggagaatcacttgagctcaggagttcgagtctgcagtgagctatgattgtaccaccgcaccctagccaggacaacggagcaagactctgtctctaaaaaagatagaatgggctgggcacggtggctcatgcgtgtaatcctagctctttgggaggctgaggcaggcagaccacttgaggtgcagttcaagaccagcctggccaacatggtgaaaccccatctctactaaaaatatgaaaattagccgggtgtggtggcgggcgccggtagtcccagctactcgggaggctgagccaggagaatcgcttgaacctgggaggcagaagttgcaggaagccaagattgtgccactgcactccagcctgggcgacagagtgagactctgtctctaaataaataaataaataaataaaattatataaaataaatagtgtaataaccaactatgtagtcacttcaggctgctataacaaaacacataaactgagtggcttataaacaacagaatttgattctttccgtctggaggctggtagtctgaggtcagggtgcccaaatggtcaaattctggtaagggccctctcctgggtttcaggctgctgacttctcactgtgtcctcacatggcagaagggcggggagctctctaaggcctcttttatacgaacctaaatcccatccatgagggctctaccctcatgacttaaaacaccttctagaggccccatctctaaataccatcacattgagagttaggatttcaacatacgaattctggggtaacacaaaccttgtctgtagcagtgaccataaacccatccccccagacaaatctaggacctggagcataacctgcgtctgagcagattgccatccttcccacacctcctctcccttcttttctctacccaaggtaactattatctgaaccctgtatacatctatgtttccttttctgcatactttatttcgcttacatatcgttctaaaatggaacacataaaaacataagacatacacacataaaaagtatgtagctatatagatatgtatttaattgttatcacctttcaactttataaaaaggatatcagaccatatataatcttttgggacttacttttttacttaacgtctcgactgccagcattcatgtgtattgctatgcatcacggtagttaatttgccttgtctgctgtatgatgttccatcatgagccgattatacacagtttattcattcactctctcattgatgggcgttgaagttggtgctaggatcttggcaattgcaaacaggtttgccataaatatattcatgtatgtataatcagttgtccacgtgcaaaagagagtcctttgtgttcgtgactccattattttgaaaccagcagtagtactgcacactgggagaatgtttgtgggaagcacaataaaggtaagtcctcagtactttgtatttcagtttggtgtgaagaagtagcatgtagacttcataggagacaagacacttctatggtttgagtatttgtctcctccaaaattcatgttgaaacttaatgccttaatccccggtatggcagtattgacacatggggcctttaagaggtggttgggtcatgagggttctgccctcatgaatagattaccccattcatgggttaatggattaatggattaatgggttattatgggaatgggactggtggctttataagaagaggaagagagacctgagctagcatgctctgccccttaccttgtgttaccctgcactgtcctggaactctgctgagtccctcctagcgtgaaagccctctccagatggggccccttgaccttggactccctagcctccataactgtaagaaataaatttcatttctttgtaaattacctagttttagggatttggttataagcaacagaagacggactacatatcttattttaattttgttcctcccactaacttcccagccccacagtgcttggagcaactgtttctgcagtcatgacttcagtacagttaatgcctgttgacttcatcttatgttaaattctttgcaggtaaagccatgttccttataagatcagtctttttttgttcctctatgtgtctaatcaggtcaattctttgcattattttatttagcatcatctaccaggaactaggcaggcattgtcttaataaagcctggttcttgcagttggagaacttgctatctagctgggagaggcagtatgcaaactaagatttagaatgcgttatgaggccaggcgtggtggttcacgcctgtaatcgcagcactgggaggctgaggcggatggattgcctgagcccaggagttcaagaccagcctgggcaacatgacgaagccatctctacaaaaaattagccaggcatggtggcacatgcctgtggtcctagctacccgggaggctaaggtgggagaatcacctgagcccaggaggttgaggctgcagtgagctgtgattgcaccactgcactctagcctgggcgacaggatgagaccctgtttcaagaatagtaataataataaatttaaaaataaaatagaatgcattattatatgtaccttagaacttaggtcttagagagtgcctacctctccttgggagagaagacttacggtggtgggagacagtgttgcatctgtcagataaattagggaaggcacatggggcggacgatttcagagaagttaaaggcatgggagaacatttgccacgcaggccgtggcaagtggttggctttgactgtaacatgcagcgtatgcagttcctggaggcagatgagggaagtcatgcagtacttgtgtttctgtgagtctcttcagttttggggtttgtagacaggtcatgttcacttactcctaacctgtctcccacaatagtcatctgggtctgtgctacttagtgtcatcctctcactctttcccttggtggcatatccagttggctaagaggacaggcctgaccttgtgcccagagtagggagaagatcccgatcacctctggtccttgtcaggctgtttgcttggatggtagagttcacccaagttcggactcaggaacggcctgtggtcatggagtagtttttttctgtccagggtctggaccaagataactccatcacaggggtagcaacagtatgtgctggggcaattctgctacccacttctggtgtccttcagtgctttccctgcactatctctgtccccagctgcttccatccatttgctttctagtgatgaagcactgggggaagctgcagggatggctgctgcacccacatccatccctgcccatctgttctcagagactctatggctagcagagggagtgatgatttcagggaagagtaccagagagggccagtgggtagcaggagtctcacttcttggagaaaacagctggtcctctgtgaccaattctccctcaaactagggagattatatggccactgcatacacaaacacacatgcttgcgaagataggatggagttgtaccaaataaaaagtttattgaaagggatggtggtagagaaacactgtatcatgccgtggcataacagggtattatatgttggatggctttttggaaatcattttaggccaaccttattagagatctaatttatttgtattcttgtagctacctagcacagtggtaagaacacagaccaacatttggtaaaccttggtttgaactctacccctgctgcttctgacctctgtgagtctgcatattatttaacccctgaggctcagtgtcctcggttgaaaaatgggccactaatttagtataagggctatgtaagatgtaatgcacatgacatgttttataatagcttcttatggaattatctgaattggggacccatctgttgcttttataaaaagttcaccccttaagacaagtcagtccaatggccatgtttaaaccaaatgtactgtcttctgtaatgctcaatatatttttcatgtcattgagtgcagagactaggtgggaagatgatcatatacagacagaatgggcaccactctgcctaaacatggctctcgctttcaaaacagtactttaaaatatctcctccctattaaacttttccagtgaagactctttttccacctggttattgtctctgtgtttgttacagccttctctctgctttcagatattcaactctgcaaagtcgtaatcatttatccacatgtacttttgtgtgtgtttgtcccatctctctctttagaagacatgttcctgctggtgcttggaataagacgttcttttccctccccgtggagatgctatttttcctctctttaaggagctaggagagaatttggttcaacatgtcttatgtatcagtttagcactgtgcttttcttcccttagattgacgtgtgatttaaaaaaacaaaatttggaaccggtcatgtaaagatggtgtatgtcacttagtataggtcatctctgtaccctttgtatactgaattttgctgtgacctgtcaaaggataccgaagacaggcccatgcgaaacatttaatttctggcattttcgtgcatgtgagactcatctgatgtgaactgaaggtatgttatccttccttttaatgataccaaatctggcccaaattcatatgaccccttagaaaattactgtgataggaacagattctaatgaattgaaatagagatttctccacctcacgtaattaggatttgagagttaaataagaaagtcagggatagggacagggatagaatggcatggagaaagttggagccaagaacactgaggaaaagaagggagtgacagcagcaaggaccattgctgttaggaagggaattctttcatcagacactggaattctcctgccaggcactggagtttgccctagcttctgtctgcttttactggatcctgggtcctccagctgaagtgagttgtattacaatcccttccagttttgcacttcagggaagtgaaatggagcaaatcctaatggcacaggctggagggagaaggactagtttctttaatgtgactcaacacctggcaaggctgtctttttctcaaccgggtttcatctgttagttctgcaacatgcagagtcagattttgaggagtttccagctctcgccttcatggctgtccttgtgtttgtgtttgtgttctccaggcgcctccttctccactctttctccagtgctggagacctaggggtgtgcatcctggaggattgtgaggaacctcagctgctcccctcgtcctctgaccaggcggtgggctcagggagctttggagtctcatgcggtcagcagcgcttagcatgttcagttggctttttccatatcaccagtgacatctttcttcttcctaatcatcgactcatggaatattagaattaccaagcctcttgcagttcctgtggtctaattccttcattttagagatgaggacccctaaggcctggggaggggagatgataggtgtagggaaaaaaaaaagaaactttttcctctaaataagattagcaaaacgataaattaacaggagaaaaatagagagtttattaacacgtgcagcacacatcacacaggagaaacctcagtgatgagtaactcaaagtttcaagagtttttatttcttttttctgtatagcacttgtcagtctctgatattgatttttacttgtttcttaatgtttgttctccttccactagtacgtacactccatgggaacagtgattttcatctgtttgtcactgctttattcccagcacatagagctgtgcctagagtggtaggcagatcattgttaaaacaatgaatacatgaacttcgggcaagttacttaaccattctgtacttcagttttcttgtgagtaaaatagggattaaaatagtgcctacttcatggagttgcaataaaaactaagggagttaatccatctaaagtaccaataacccacctggcccatagtaaatgctcaataaataggttcccagccaggcgcagtggctcacacctgtaatcccagcatttgagaagccgaggcaagaggatcacttgagtcaggagttcgataccagcctgggcaagtggtgaaaccccatctcaactaaagatacaaaaattagctgggtatggtagcaggggcctgtaaacccagctattcaggaggctgaggcagaagaattgcctgaacccgggagatggaggttgcagtgagctgagatcatgccactgcactttagcctgggcaacagagtataagactctgtctcaaaaaaataataataaaaataaataagttccttattataattactaaatattgtatttcctcactagaatgcaaactccttgagggcagagactatttcttacatcatctttttatttctagtagcaatttggctgacacatgattgatattcagtgtttgttgaacagatagataagttatagaaaaattgtaggtaatacttctgtaaataattgttaaatttaaatgaatagatttccttcctgtctttttccctaagctgcaatcagtgaatctacatggattacatagattgtgactacactgtgccttaactcatcacttaggcagtggagtcgatcatttattttgttgccatgacttggctgaaatttcttggggactgacagcaatggcagaaacttgatgggtcctgaatgtcaccatagcctgtaagctacacaggagccacccgagaactcctccattcgtggttgtaacttcacagaaatgcttcccagtcagaggaggtacttagcagaggctgcaggcatctgaacagacaggtgcaggaaaagttgaaagggaaggttaagggagaaacatactcctcatctccgttctcaagaaacggcttaaaggttgtaaaaggattctgcttttaagcttgagtcactcatttgacttctgtgggccttgcaatttctctggtaaaattagagaatatgaccaagattatctccaaggacctgtcttactttttaagtttcctaattctgtgaaaaatgcttaagaaggcctcagactgattaagaatttaggggtgtaagtttaagtggggatactgataaaagggcaggggatgttactgtaagagcaatggaaaagtgtctgagtagtgtagcatatccatttgtgagaggagtaattaattaaaaaatgaaggcagaatccacatcttcacaaaagtttcctatctcctggtttggatgagtgtatttaatgtgaactaagttgcatgtgggctgtctaatctgggcatctgacttgtgaatccttcccataactaagccccgagagatttccaatcatgcccataaggtaatgcaatttggcaagaggatttggacttgacgaaatctcttgttctatttggcatccagaaaaggctgacttgcctaatttgaaaataaattgaaaacaaaaaaaatttaaaaaaacctctggttgttccttgtttgatgaaataccatagaaaactattactctttttccataccccattactatggagaatatgtttttaccactgactcttctaagtatctgtccttagtttcctgtccttccctgccacaggttccaggaaggctgaatcactacagcatggtattaaatcatagaaatacgtgtgtattttgtaccatgtgggtctgcttgcattcctaacatctgcattagtattagttttctattgctgcataacaaactgccacaaatttagtggtttaaaacaacattcatttcttatctcagtttctttgggtcaagaatctggacacagtttacctgggtcatctgcaaagggtctcagaaggctgtaattaatgtgttagccagggctgtgttctgatctgaggcttgactgaggaagaacccactttgttagcagaatttagtaccttgtggttgtaggacagaggattttagtttcttactagctgttggttggaggcttccctctgttccatactatgtgggcctcccaacctagacacccacaacatggcagcctgctccttcaacaactagcaagggagtttaatgttttcctgtagctcatatttctttataggtgtgacctcaatttttcccctaatacctttgtaagatagaagtagggagaaccaagatagatccaaaaaggctgaatgaaatgcctgagattgagctggtggttgcattgaacaatataaattgatgaataacaatttattaattgtgccaggcactgtgctaagagcttcatgtcagtacattcttgtttagttcttagcacaaccctctgagttaggtattactactactaaactatttaacaggtagggaagttggggattagagaggttatgtaacctgcctaaagttcacagacagaaagtgcacagcccagatttgaacacaggcagattccagaacccactatcatcgcactctgaagatctctccattagagcacgatgctgccatgttcaggattcttcctatcttttgttaaatacttaagttcctgcaatattgcaaagggataattgtaataggttgcccctttcaaagtgctttaataaaatgaaaggacaacattctttcttttctgcttgagccaggctttctcatttttctgaagacatctaggataaatggaaggaaaccagaatttagtggggtttgcatgtattgataacagttttgctgaatacacatccaagagctaaaacatgcaaactcttcaaaattggtagaatacagcttgctcattttaattcatttaaaaatgttcattttaattaagcattacccattttattattccataaaacacgaatcatctggaaaaggcagcataggtctatttttccagcctataaaactatatgtagatggatcttgatgagggatgtacaagatttaattagaaactgaaattttagagtaaaaaaatgcaggggtgtgtgtgtttcttctatatttgtggaaacccaaagagctatcctgcaggatacttgaaaatatatataaatacagaggagaaataaagtgcggagaaggtttgttgattattgagctttttcatgggtgatagaatggagcagctgtaggatggaggtaaagaggataggaaaatgctcttctgggtcagacccagccccacatcccaaaatgttgtggccaccctctgtgttatgtaaaatgtaggaaggtcctcccagctggaggaccttcgagtatactgcgttccccctcctcattcactagggaggatgcaaaggtgcaaatgggccaaggtcatgcattggacttccttcattaaactgttatgaatttgccttccctgagctcctgttggaaaaatgtcttgaacttactgttgttgtttctcctactgcgtttgtatttctttttataaaccttagtccaagtcagcccagtgctgtagttatttgtgtatctgtgtcattctccctaggatgccctgggccatttttaatcaactttgatcccctttcagtgccttgcatgaggcctggaacattggaggtacacactgtgtattgactgaatcgagtgaaaggtatttgaatatacagttgactcttgagctacatgggggttaggttgctgacccctcacgcaggaaaaatatctgtgtataactttttaaaaaataaatttgggggtacaagtgcagttttgttacatggatatattgtgtagtggtgaagtctgggcttttaatatagccttcaccctagtagtgaacattgtacccaataggtaggttttcaaccttaacctgcctcctatctttggagtctccaatatatgttatttccctctgtatgttcctgtatacccattctttagctcctgcttataagtgagaacatgcaatatcttactttctgtttctgagttatgtatataacttctgagtccccaaaaacataactactaatagcctactgctgactagaagctttaccgataacgtaaatggttaattaacacatattttgtttgttatatgtattatatactatattcttatagtacagtaagctaaagaaaagaaaatgctattaagaaaatcataggagaaaatatatttaccgttcattaagtggaagtggagcatcataaaggtcttcatcttcatcatcttcatgttgagtaggctgaagagggcttggtcttgctgtctcagggtggcagaggtggaagatgcggaggaggcgggaggaaaggcaggccactcagtgtaaatttactgaaaaaaattcacatataagtggacacacgcagctcaaacatgctgttcgagggtccactgtatttcatctgtttgtttcctactgtggaagacagggcttccaggctttagttctaaaacttccattgtaaggccttgaggaggatcctctcattccagtaatctgagagttggtaaacaaattcaaagccactgtatcactgtcctttatgtccctatgttttttttttttacttttttttgccatttcttttttcttttgcactttaaaaatcgtggtaatatatacataatataaaatttgcccttttaaccattttaagtatacaattcagtagcattaggtacattcacattgttgtgcaaccatcagcgctctccagaacttttacatcgtccccagctgaaactctgtccccagcaaacgctggcatgcccttctcccctcccccagcccctggtaatcaggggtcttcttcctgtttgtgaattatgactactccaggtctctccgtaagtggaatctcatttgaccttttgtgactggcttatttcacttagcatgatgttaaaaggtttatccatgttgtagcatgtgtcagaatttcattcctttttggcagccattgtcttaagactcaagagtttaagtgtttttagtctctgtagccagaggtagatttttcttccagctctgtgcttgggcatttcccaaagcgaaacttccaaaggcacatcctgtcttcctgagtggtattctttgaggcagctgagtagcaaaactgaggctattaatgttcgcttagcaactgagcagctactgtgtatcaggggctctgcctgtgaccagggagtacacggtcttgtagaagagaaaaccgggtactcagctaactgtggtaccatgtgctaggtgccaaaggaggaacagagggccctgcgtgatctgctcaggaccgtgagggagaggtaagaagagttcaaaggagaggtcatatttcaaacagaccttgaagctgttcaaggcagagaagaaaaggatggtgttccacgaatggcctgagctaaggcaagtggaaacacgaggtttgttggaagaatcgcaaggacagcctgatgtttatagaaagtggagagagtgtggggaatgacattagggcgtatatgaatgccatgctaaggattggggtacaggtaacttggaggcctcatgcagttagactgaccccgttcgatctgtgggttgacaggggggtgtgaatggattggaatgggagagaccactgtgtggggcaaatgggaagggagcgtggttgcagcattttaggccagagatggtgagggcctgaagcaaggcagtgagagagaagaatttgctcatggtcaggtgcatcgggcctgttgacagcagagtttgttggactgctcccacctattgctttttgtcttctgaagtttttataatttcaattccagtttagaggtctgtttttagaacatttctccgatcttattatacccatagtggcaagaatgaattgatttgtacaagatagctggacaggttcctaccttcaggctttctacccaactgggcacttggaaggatagtttttcatagtcttcatgggctaagtgattgcatgtaatatacaatagctggagtctaactgtaattaaaacaggttagccaagctacaggagaagtatcccccccatccccacccccatggcccttccccactgcctgtaatctcttggtaacaaaagaagtcaaacaaaaatttcatgcaagggtataaacatactttgagtcatcagaacctacctagtggtccatagaaccttggctcttcatgaagggcttaccaggaagacatagtcgttgttcatatgcagtttctattctgaactgtaaaatgtgagcgattactttggaaaattagaagaaaaaatgaatttactcaggatccttaaaaggttacatttgtcatgcctgtaatcccaacaattttggaggctgagccgggtagatcgcttgagcccaggagtttaagaccagcctgggcaacatggcaaaaccctgttgatacaaaaaatacaaaaattagctgggcgtggtggcacatgcctgtagtcccggctacctgaaaggctgaggtgggaggatgacctgagtccggagaggttgaggctgcagtgagtcaagatcgtgccactgcaccccagcctgggtgacagagtgagacctcctctggaagaaaacaaacaagtgacatttataggagggtcccaaacatacaaatatggaaagtgaaaatactacttgctacaggtactgaaagaaaatactcaggagtcattattcaactgaaagcagattgaggcaaaggtgctgaaatatactaaaaataatgagtttcaaagaaaatcatcttttgttaacctttgcattagtcagtccttattttttcgttttagtcactcctttacaacaatgtgtataaatatagaagatgaagagaagtgtgataaaaataatttaagatttggaacatgggttttcaaaggaaaggttagagaaatttggggattaaaatggacagactttatcatcttcaatattaaaaaaaaaaacagaaggatatttacgagcaagccaatgaaatgataccaagaagtttataacacatactctgcccttatggggctttcacctagcggccatgtttccattgtgcagttaactactcagttattttttatttcccaagagcactaagtgaaagcaaatgcatgttaagtcgtgggggctattctgaatgatcaatagagcccaccagagtcccttataactaactacccattagcagatgtggagtttccttcttggggatggaggggactgagtcggggagcttcctggatgggagtttgaaccaaataatcttaattatgtaattcctttcaattttaagatttgagggcaactttagaaagagataagtaattgactgaccaactttataaagagatcagtaattgaccacccttggagtgtaagagtcaacacctaaaataaatgtatatttctaatattttgaaaatagaagaaaaaggaagaaaggaggaaagacaagttatctagtggagacgatgaattttcaggtcatccttctagtttttattttagacttgtgtctttagttgaaattattacaacttgcatgtattttgtctgtttactcattatttcgtctgtctcaccgttccaaggtaagcaccgtgaaaacggactgtgtctttttagttctttactgtgtttctgccatcaagcccagtgttgacacatggtaggtactcaagacatgctggctgaatgaatcagtgagtagtgaaggtggatcatggggagaagagtgctgcaaataccagagagaaggagaagaaggaagtggaggggatagcggaagaaggggaagaggagtgagtttacaaggcctttttttctttttttgacagagtctcactctgttgcccaggctggaatacagtggcgtgatctcagctcactgcaacctctgcctcccaggtttaagcgattctcctgtcccagcctcccgagcagctgggattacaggtgcacgccaccacaaccggctaatttttgtatttttagtagagatgggatttcaccatgttggccaggctagtctcaaactcctaacctcaagtgttccgcccaccttggcctctcccttgctgggattacaggtgtgagccaccatgcccagcctccaagccctttcttttaaaaaataaattttattgtttatatttgagatttacaacatgatattatgggatacatatagctaatagaatgggttgctatagtgaggtaggcaaccattctcacaggggtttgtgtgtgtgtgtgtgtgtgtgggacaagaacaactaaaatctacatatttaacaaaaattcctaatagaatatagttttattaagccttaaaaaaggagatcttgccatttgccacaacatggatagacctagaggacattatgataagtgacataagccagatacagaaagaaacatattgtatgatctcacttttatctgaaatatttattttaaaagctcaaatacagagacagagaatgaaacagtggttaatgccggtggaaatggggagatgtgggtcaaaggacacaaaatggcaagtgcacaggatgagcgtgtctagagacttaatgtacaacgcaaagactaaagttaacaaggccttttggttctgttgctgttgttgcattacgtaatagtgtgctaagaacaggagacacataacgtcatctaaaaaacaggagatgaagtgggccggtgctcaaacatgctagctccgggaaacaattcaggatgatttgccactgagtcaggtttgttaattttttctacaatagccaaaggctctcaaaaaatcaaggtttcctggtttataaataatctctggaggggtgtgtgtgtttcaggcatctgactcctttatttatattctctgccctggccttcagatgattttcgagcggctttcgattagattatctgcattgggataatggagcaattttgcagcaaactgctttggactgttcgactcttctcggcctgagtagccaaaaaataataataacttgatttagtctggtctagcctgctgtagtctgacttaaggatataatatcccagaccttagacacttgacttaatacattaacatattaacaaaagggtaaaacaaaatactagaagaaaacataataaaaacagcacattatttttcgggcatttgacttgaaccacagggtgccctcataatgaaaagaatattccaagggaaagatgagaaggcaattgagacaaccctaagcccctgtctgcccactcaaaccctctggccaccactgtactctctccaccatgagaaagcaggccaggagtcagttcagctgcctgtgtttaagtgcttttaatatccatggaggcacagagaaatgaaagcaggagccttgaatctagatttttccagaatccttttgagagacttattgtagcggcaggagctccattttgggggggtcaccccctgaactttgatggttttcaaatctttggagggccttggtcttagtggctcagaggtcccctgccaggacttctttaggatggggatgataggaagcgaacgttccttctgttgaggtgcatcagccttgcatctgagttcttgatgtcctcaggcctggcttcccagttggttaaaggaatgaaaataacaacgcctttcatttgcagtgcagctttaaaaatatttgcttttgctatctcattttatcctgataataaccgtgtgagaaaagcaggatggcagtcttactgtccttgtacacatggagaaatagatgcacagaggttaagttgcccagtttagtaaagggcagagcagggactagactccatttctcttcgctggaagagcccagcactatcacattgcaagattgtttcttgtaaaacagtcctgcataaaaataaaaaagagtagagagcatgatgtgaatttcagcttttagaggctgctgtctgtttttcataggttaaatagtgaatcagtgtgctccgagcttccatgaggggcagccctccttacctggcaggttactgagttttctaatgacttcagttttaggtgctaggagatagtagggccacctgcactgttttgtgagcaggacagataagaggcaagtggagagggtgggagagcactggcttgcatcatacaccccagctgcccttgcagggcccgactgttacaagccaggtatttctaggacgattgcattcctagccatatctgttttctttcagatggggcgtacaatttaccttttgagttctgtaaatggaatcgaggtgaaatctttactctggtgcacatatgacctgcaggttgatgctgcttgtttggaaagccctctacttcacagcgaacagtttgtactgtcaggtagacctctctgccaggggaccaactcctgtgtatttgaaaaggaagacaaacctgtattttgtagaaagggtctattgttcccagggggtggttgtggccaacttcttggactcctttggctgactctgaagaaggaattgaagtcagaatgctaatcactgacttgcacaggcctcaacaatcaaacctcagggaactcagaagaaagtaaacaagagcgctcaattgcagagtcttgaagaagagcagctgtgtaaaggaggctagacgtgaaaaaaacgtgttggagaggaaaaaaaatcacattccctgcttctcaaatgggaagtcttaaaaataataaagaatcctgagcagcgggctcatttcccatgagcaggcttgctgtggcaggcaggctcacctgctagaggtggtctcctggcttagaatgggagcacacctgtgggaatcgcagcgcttctctacctgagctggatgtagattgtttgaaaatcctagttgtgcactgcgtttccatcgatccctttcatgctcccacttgttcctttagttccaaatagcaggctggtgttgagaattctgtcatcatggggcgtttttttctaaatgtgagaaatgtcggaagcatgggtgttctcagattgctttagccactgatgattttccttttagtgtatggaaagaatgattttcttctcaatttctcccctctaacctcctgcatgtagatttatggattctaatcgggacctttctttgattcagtgccaggtacacaggccccgagtcgtatgtggcaagtggccaaggggatcggtcctggagaacgtcatggcacacaggcattggccatggagtggtgatccctggctctggttcttctccgtccagtgacctggcatgtcacctcacagggccatatttacctgttaactgagaaactgaactagaacatggttatgataattttaatctcaactttgtctcctcctatcttatggcagtaaagtgaccttttagcaggatcaatttataagccgtttgaagtctatcttttcttcccttagcagttgtatttgtgattttctcagcctgattttaagttattctgttataattttgaatgttctgttatgcttccctctgtggtgagcatacgtcgaaagctgtacatttccttcagggtaacctttgtttccaacaggagagagttctcactaccacatccagccttgatctctttaacctaaattggaataagccagacagagctggggttcatgggacagatgggagcatctcaagtttagggttggggagtctcagtgaaaaaaaaaaaaaaaagaacaagaatgtagacttggaatttgagaacagataaagcagtcctcacttgtgctctgcaagggagtgctgttgtcttctaaggtattgaacagactgggtgggaagctgctgaaagactggaaatttggggacttagcaagaagtataatggtgctgtaactgcgttttcttaaggaaacttggagctgaggtgccacctccctgggagggacttttccactggtttcttgcagtctggacatcacagacggcccagactcccccctgtcttgtgtacattcccttctacaagccttgctgtgttatcacaggtaccacttgtaggccagtatcatgggggatggacattgtttcattctaggcacattcaggaatcgtatatgtaccctgcctcgcttctgacctctcaagtcaacttttggagctgttagtgacttccagaaagctgacacccagtgccactcaaccaaccctgcttttctgctggtttatttttgttattcctaccccgactcatcttgcttttcagccatcaatgagaatttattgagttactcagacactcactcagaccctgtgggagagtagaaagatgtgtaagaaactgtcccagaattttgagggacttaaaatccattcgaaaaggcaaggtctaagcacatgaaaagttacctagcaatatcagctcatgaatggagagacagttgatcagagaaagagaaatgtctgttcaggagtggtcaggggaggctgcattgaggtgatgcacacgtgtggcctgaaagcttgattcgttccccaccccccattgtattctatatgtaatatttgatatataaccaagaagctatgtgagttacaaagcatgatgatacagtgaacacctatgaactcaccacccaacataagaaccaaaatgactgatattgataccctacctatatacctctaccttcttcctcattctacccctgccctcttatcccagttagccactgtcttaaattttacagattttattccgttcctttttttcttttttgaaagcgtttgatcttttcttctctcctcctctcctctcctctcctctcttcttcttttctttcttttcgagatgaggtctcgctatgttgtgcaggctggtctggaactcctgagctcaaatgatcctcccaccttaacctcccaatagctgagaatataggcctgtaccactgcacctggctagatctcatgttttctttggaaatctagtaattgtgatataggatctctgaatgcagaacacctagggcacaagtgatgcttaattttatgtgtcaacttagatgggccacagtgctcatatgtatgatcagatattcttctggatgtttctgtgaaggtatttatggatgagactaatatttaaattggtggactttgagtaaagcacatggccctccgtaatgcgggtaggcctcacccaatcagttgaaggcctgaatagaaccgaagagggaatgccacagcagatggccttcagacttacactgcaccaccggctcttctctgggtctccagcctgctggcacatcttgcagattttgggcttgtctgcctctataagcacataagccagttccttaaaataaatatctgtgtgtgtgtatgcatttatatatacacacaccaccctattggttcactttctctggagaaccctgactaatacagcatatcacacctctctgtatgccacgtaggtagcactgcagaattaatttgcagagtattctcacatcgggaggtcagcagtatattaggcgcatatcagaaaggcatttggatgattctggcctacaccatggaagagaaaccttgattttctgtaaaagcaaggccagctttttttggagaactcttttctcccttttagtattctgtcccctcccaaagctccgtggctttctctggtcattcagagaccgttattccctccccagcatacatgcacactcatgtctatggtttcccgtaccttctctgtggagccctggttctgcctgttacaaggaaaggcatttagtttctctgacctcctgtctcctcagatgtcagtctgtatttattatgtgtcaccatgtactagatactgatttaagtgctttgcctgtttattccatggtattttcacaacaatcccaggtggtaactactatcatcttgttcattttgcagtgagaaaatggcaagaaagtcatagaaatgggatttgagtcctggtagtccgactttagagcgcttgcttctgacgcttctgaaacacattatgaactggaaattgctctacaaatatacactactgttagtatcacaatgctagtattatagtgcgcctattgccttggggccctgcgctctgctagttgatagctagggcatttttggagctgatgcaggctaatgagggtcgttgataggaaagtattgcttttcctagaaagctctggttctttgacagaagccttctggtggccacagttcctgagccctaagaagaaatcctgtagggtacctctaggacatgatggttagtgtagggtcatgagtctgctctctggtcatgtcaagaaagctgccccctactttgtgtttaagcagatcctggaggctgcaggatagcccattgagactaagtggagaccaggcatcaggtgaggaagccttagcttggagggtcagaggcctcagctagacttggtaaatatttggcacttcctctccctcacaggaccacagcaaatgttaaataatcacagcactctttagtttgaccaccactaatcgattgagttgggcaaatagcatggaaggtctttgcctattctttgggagctctgggtgtccccagagaattgagtctggcattaagttttgcctctcctttctcgttttcttttcccagccatatttctccaggttttcagcacaaactcaacccgttatttttgtttcttcagtgtctttaactctttccctgcctgttgagatggagtctcactcagttgtttagtaatggcagtacatcgagaagaccatcacacagcaagagttctaggagtttctttgcctgtgaggttagttttctatatttcatttgtggagggaacagaagtgatcccatttaagtgtggaaactttctttttggaacattttccttcctttttcttcatacatcgtggttccttctctcctgcactctcacatagataccagtatatagagatactgtttctaatcctgaaattccttttttgaagaaaagagaacattgtgtgccattgttttctgcgggagatctatgctgcgcttctgttttccaaacatttatccttaaagcattttcagatgtcagttaaacaagggagcaatggcccctgggtcctgttagggacatactcttaatgactgtaaaatgaataaggtatagaggaatattcgtctgaagtcatgatttgtacgtcatttccttgctttcttcaacatcattatttctgaaccagaaagtattttgatcaacattttggaggaagaattgtatggtatttcccaaccttccccccgtgggtggaattgcatcactgaatcacttttctctatttttttccactttctgtctcctgttttgtcaaggctccagcaaactccagccttttttctgtgttttttagtcctaaaattctagcctggcatctgcgattgtgttagtttcccatcattattttctagcctaacaaggaagcctcgtgaaaacaaagcgttctgtttaatcctcaggtggacgtttgaaccctcgtaaacatgctcccttcacccccccatcttactttttagcaatctcagagatcaaaaagacagtcatctcatccagtgtagacaaagtgaagtacattcctttcatttgcctttgctgtagtccctatttcatccatctaatccgttttaagggataaaattgcaattacaaacatttcatgtgtggtcagatttttagtattttaatctggtctgagacttaagatgaaatgacagttctaacagaggtcctgtgtggaagaaaggacctaggtgccagtctcagtccagtcccttcttagacgtgtgactttggaaaacctctcagagacccatcatctcgtcgtagatggggatggtattacaggtcgtgctcatctgtgttaatcagggttctccagagaaacagaaccaataggagatccacatcgctgttgatgtcaatagatagataggtgtgtatgtagggatggcaggctggagaccctgggaagagttgatgttgcagtcaggaggctgaacttcctcttccttgggagacccaagtttttttctcttaaggccttcaactgattggttgaggcccacccatattatggagggcaatctgcttcactcagagtctactgacttaaatgtccatctcatctaaacggtatcttcacggtgttcaggcaaatatcggtgccacgtcctagtcaagttgacacctgaaatcaaccatccccctcgcaggagtttgtgagcatcaggtgtgaatggtcaggagctgcaggcgtgcacggaggaggccactgttcttcatgcttgagccttttctgtttctgcctcgtttactttccttctctctcctcactgttacccttttcctcctacctctgacacctgcccttcacctcccacctgctacctgagatgggagccacacgtgaagtgagaagaagggagaatgaccaggtgggtgatgaatttaaactggaaagagaacagatcctgatgccagtcaggatagaggtggtctagctcttatgtgatcatgggcaagtgaacatgcctcagtgagcctctgatcagtttctgtatgaggataattatatttatcctctaaaatgaggataatgatatttatctgatacagttcttctgccctaacacatacgtgtgcattgcctttgctttcaaatgtttggtaatcacctttttagatttaaatcattactcaaattgaactctccttcagcctttgtgtgtctagactttccgttaagattagattacttgttttactatgattgtaaaccattgtttccatgaagtctcatagcaaatgttcttttgctttcctcttttgttactagtctcttgttatttctcaaacatatcaagcgcacttctccctcagggcctttgcgtgtgctgtttcctctacatggagctcagatgactgcatgtctttttcctaaacttctttgaggtgtctgttcaaatgtcttccactcaggggggctttccctgagcaccttatagaaaataaataaaatgatataatatctgctctcacgttctgttgcacttgccttgctttgtttttcttcatagtctttatctggaatatatatttatttctgtctacatcctcccactaggacagtggttcttaaccttggatgttcattagaatcaccctgggagtttaaaaaaatcctctcctgtgttctagaacaattaaattcagtaatgttataaggaagagactcagcattagtattttgtaaaactcccaggagattcctatgtgcaaccaagcttgagaaccagtgttctagtctagaaccttacttcccagaggatgtggactggtggcatcagcatcacctttatttgaaagctgagtccaattcttctctttggcaggacccacagatgatgcatatgacattaaagcttgagatgcactgcactagaatgcaggggcgtcattttgcttgctgctgtatccttagtgtcagaacagtacttagcacatcataagcactcactaaatatttatcaaatgaattaacgttggagatgagaggaaggaggaggtaataatggaaagaggacaaagaaagagaggcaagggaagacagaaagaaaacagatttggcctccccacattttctgggcacagatataacggctctctcttgctctttgctcccaatcaaaactcagccagcctcatgtccaacatctcatgggcttgcctccagttctctgcactttccaaagtgatagctgactaatcaaagatattgtgataatgaattgcctaactacgcagcctgccttcttctcttctagcatgtatttgattaggggcctgctgaaaccaattaagtaaataattcagtatgactttatgaactacctactacatgcatggcttaacacaggcagcctcaagaggctgagaaccaaagacggaaaaagcacaacttatagtccagctatagagacagacttttaggtaagtaatcataccttgaggtgaaaaaaaaaaaaaaaaaaaaaaagatctgtgatggaagacacttacagacatgtagacagggtggtgtggaaggtctacagtaagtgactgtttcagactgaggggagggagtagactcctggtgaggagggcaggggcatgtgagttgcgtatgtgagtggctggaacacaaggtggggaggcatgcttgtgtgctttggcaatcacaaagacggttagaaggcagttaaagggttggagtatggtcagttctgtgttttgaagagatgactgacagtcgtggaaggtggattggagaaggaagaccatgggcccatcacacccagtttggagatgattaaagatgatacccacgttacatgacagagccgtggcaggggcaataggatgtaaaatgtggagatcgttttgagatttttcaaatggggaagaccatgtcttttttgtttaaccgaaatgagcaggaattcttggggtgacatcaaattcgatagttctatgagcatatacactgaaaaccacgatattacggaaatataggctatttctcttttcactggcctttagatagactggattagtggagagttgagcattcgtcttttcttagagccttgagtggagatggaccctagtgattatttattttgactgctttattttgaagatgaagagaaggaggccaaggtatgaaatgattatcagaaccaggaatgcaacttgaggtcaccattactagatacatagtgagtgccaggtggtttaaatactcattatcaccttcaatcctcacaaccattgtatgaaacagggatgctatgtttattttagggatgagaaaacccaaaactcaaggaggtaactcacccaaggttttgcagctagtaagtggtacagctgggatccaaacccaggtgtgtcccagctacgctgtgccatctactcctctgccctgctgctttcctaatcagtactccctgatgctgctgaggaagagtcgaacttatagaggtcacacattgttttccttgtttttggatgcagttttgttttctttgataatcataaattgaggatttatgacagccgatttctctctgttattttggtcacaatttcacaatgtgacctttggaagtaagggctttgagttccttaaaatagctaaattgagaggataaaggaaaactgactcaaatcagagaatttgcatcaggtttctgtaggtttcttataataatcaacaagtatttagcaattcttttttcacataaatagaagagccaagagaagaacagcgtctttgacctgatggtgttaagcctgcaatctgggtaaaaaggaatttgcggaacactctggatctgatactgaaaagttgaagaaagcaacatcttgcttattacccttgtgtttaagaccatttggggccgggcgcggtggctgacgcctgtaatcccaacactttgggaggccgaggcgggtggatcacgaggtcgggagatcaagaccatcctggctaacatgaaaattagccgggcatggtggtgggcgcctgtagtcccagctactcgggaggctgaggcaggagaatagcgtgaatctgggaggctgagcttgcagtgagcggagatcatgccactgcactccagcctgggcgacagagcaagactccttctcaaaaaaaaaaaaaaaaaaaaaaaaaaagatcattcggaaccgaatatgtgaagatcagggctgtgatctggtgaattgggagtgatttatgccacccaagcgagttgacctgaaccgctggggtccatcatcctgcttctgtttctgcactggcatttgtgttagtatttggtggaaggtggttcacttttggctgaagttggtggatgtgggcagagcaggattagttcctttcttctgccctctcttctagcaatgctccaaggatgctttggaagactcattattcagagctgcagctggactgccttagacatctgcatttctctatctctgaaataagggactcaaacaagagcatcactcttttcctttccagctctaaaattatgtgatttttctttcacatggtaagtgaaatagtcatctgagctgctgtagtaggttgagcttattgtatcccagatctgagtggttcaactccatgttcatgctgcccagttccaagagcacctctgtggccttcaaacagttgtacacagtctgtaaactgctcagccacttctcccagtcttctaagcaggcaaagactccttatctcttagatctaaaatcattaggtagattttgattccaagggtcaaagcacagcatggtaggcagcaagctctcatccaagcccgtatttcagcaggcaggcgatgctgaggtgctttaggccttcagtgcacacagatagatgcttcccctgagcctcagggaaagctttattttgcccacgttgtattccttcctgcatcgtatatgttaatgttgctctgccactccaaatacagcagtgtctgctcagttccattttcttccttttgcaaagagcaggcaaccagctatgccttcctgagagcagacaaacctggagccaagggggccacattttcagcttcaatagcaattgctgcagctcccttatttcatcacctattaggatgcgcaggcggcgctaagtgacacatagcccataaaacatatctgcttcctgctgatttcatggttctggaggacaggctgtgcacagggattcagacagagtgtagtaacaagcaggggtgctatggaatattcatttatcctaaataaatatctttttggcaactgcttttccctatagtgtaatacagtaacgctatggggcatgtatacatgtgtgtgcataaggaacatccgtccatctctagctgtcatgtctgagaacattaataaaaggctcgacctcatgcgcctgcaagtgatcacaagacagttactgaagcattcaaagaagcaatgtctttgtcatctgactcattttgaaaacgcatgagaatgctttcccaaggcaatttcttacaaaatacaccgtgggacatttttcctatagtttattgttgttgatgatcatcgagaactttgtacccagagacactctacactgtgagtgtcccctgatattccctcccactcagcctgatcagtggtatctgacctccaactactcgctgcaacaacccgttctctagctgagtgggcctggactttgaacagaattaacagcctggaagtggagttctcaatctcaacagccccttacctcatgcaaatttcttttgagctgaaaagaacaaacagaatgccaccttttaaaacaaccttcttcgaaacatggggggaaagtcaggttttatataaatcagagagatagaaataaggcccataataaaaaacttgaaatagatttgggaagtttccgaaacttccaaaaactagtggtccaaagtgggcaatattttttgtgtgcattgagaggcccttcctgtttccttggtccatgctggtgtcttgccccgttccaggaaccctgggctcccctgtgctgagcagcccccacacctcagcccaaagcctcaccccttgcctgaccacaccccatttcttttggcacagcttcccagacttacaagatgtcttgaagtgactgaatggagttagtgttcggcaggactggctaggtaactactgggacttggtgcagaatgtagatgtagggctccttgttcaaaaattaggaagaatttcaagatagccacagcagagcattaaaacaaacccaggttggctaggtgtggtggcacactcctgaaatcctagcactttgggaggacgaggcaggcggatcgcttgagctcaggagtttgagaccagcctgggcaacatgacgaaaccccatcgctactaaaaaaaaaaaaaaaaaaaaattagttgggcatggtggtgtgtgcctgtagtcccagctacttgggaggctgaggtgggaggcttgcttttaagcctgggaggcagcctgggcaacagagtgagactgtgtctcaaaaaaattctcagacaagcacaggacctctgtatgactgcacaggtcacaggtcgcacactcacgaagccagcccagtgctcaatactgtattttagaataagcaggaatcagtttagggctgccagacttgcagaacaatcactgtgagggctgatggcagatccctgatctgtgattcagaaagagtcattcagacaggcattgcccagagtctgggttctctctctcctgaagttgttgaggctgtgcagaatgtatgtgtttagtgtttcatccagtctgttagggtaatcagtgtgatttctctggcatctccaggactggaagcagaccagatttaatcaaagctgttgaagctgcccagggactggctaagctgccaccctgttagtgaggccgctggggagagggaaactgaagcctgcaccacggggagccgtatactggagtctggaatccatttgctccacgcaggaggcctgcatctcaagtcaggaggcactgcctggaaatctagcatcatgttgatactctttggtgaaggaaatgtggtccttgccccaagttatctcacagtccctttgggcaatctcatgcatattaaaaataccgacaaacatagacccacgaaagatcctgatcttttaggtctgtcatgtgatagagacagtaagtgctctgtatagacatcaggagattttcttccctgaaggacaagctcttgtagcattttcctgcactgagatgcagtcatgctagcctgtctttcactcaccagggatggcaaggaaggaccagctgacaagtaataaagcaaaccagtttgtaattttacagggctctgaataaagatgcatttatctctggccaacaccaagaggcctcgatgtctctcacagggaggaacttgatgggctgtggcgtcttttgggggtgctagggcagagtcaggcttgaatctgagaaaggcaagtctgtgcattaaaatccagcacgggggtgggtctggggcaagggacaagagagaagcgggaatggaaggcagggatgaggactggtaacagaccctctgcctccttccttcctcttccctcacactggctctttcagccacttccctcactgagataggaagcggtcctgtggtgacgccaagggcacaggcttctgctgtctgggctccggcacagtcattggctctgagtcatccgggaaggaaaggcatcttttaccgccccctctcccaccgtggcctcaggctcccaccatgcaggaaatgcctggtctcccacgaatcagaagctataaacaggactggtggcagttcatacagatttggcaaaggacgagaagctgtgggttattggtatcagtgattatagaaggggaaagagttgatatctgaagataggaaaaggggcttctgaggatggtgttagcatgttcaggcacagcattaatctttaagagtcacgaagagccatcagcacagtcatctccctaataagccttgagagtgttgtcaaagacacttctggatataagtaagaaaccattgagactgagttgtatggttaaacagcacagtttttagggagaggcaaaggcaactctgtgttcagctcttagttctgacacttatgaactcagatttaaattccctgagcctcagtttccctgtctgtaaaatcaggataaaaatttcttgctcaaggccaacaaaaacaagcaatggggtaaaggactccttattcataaatggtgctgggatagctggctagccatatgcagaagaatgaaactgaacccttacctttcaccatatacaaaaattaactcaagatggattaaatcgaaatctaagacctcaaactgtaaaaatcctagaagaaaacacaggaaaaacccctcttgacactagccttggcaaaggatttttggctaagtccccaaaagcaattgcaacaaaaacaaaaaattgacaagtgggaactaattaaactaaagagcttctgcacggcaaaagaatcaacagagtaaacagcaacctaccgaatgggagaaaatatttgcaaactgtgcatccaacaaaggtctaatatccagaatctataaggaacttaaatcaagaggcaaaaaaacaataactccattaaaaaatgggcaaagggcatgaacagacacctcttaaaagaagacatacaagcagccaacaaacaagaaaaaatgcttattatcactaatcatcagagaaatgcaaatcaaagccacgacgagatactgtctcacaccagtcagaatgctattatcaaaagtcaaaaaataacagatgctggtgaggctatggagaaaagggaatgcttatacaccggtgggggaaatgtaacttagttcagtcattgtagaaagcagtttggagatttctcaacttaaaacagagctaccattcagcccataaatctcattactgggtgtatatccaaaggaaactagatcattataccaaaaagacatatacacttgtatgtttactgccacgctattcacagtatcaaagacatggaatcaacctaggtgcacatcaacagtggatttgattttgttttaatgtggtacatatacaccatggaatactttgcagccataaaaaggaatgaaatcatgtcctttatagcaacatgggtaaccatgttggaagagctggaaaccataattctaagtgaatgaatgcaggaacagaaaaccaaatgctgcatgttctcacttataagtaggagctatacatcgagcactcatgaacataaacatgggaacaataaacactgtggactactagagggaggagcgggagggggttaatgagtcagaaactacctcttgggtactgtgctcactacctggatgcaagatacccatgtaacaaacctgcacacgtaaaccctatgtctaaagtaaaagttggaaaagaaaaaatatttcctaaattgttctagaattaagcaaggtaatatttataagacatccagcagagggtctggcaccctggcatataatagatgcctaatgaacattagtttccttatttttcttacgagagtaaaatattaagatgtacatattctgttaggtcatagaaagtttgaatggtgggaaaagtcagctgttaaaatgctgtgggatctctttttgagccttttcacctgtgatcaaagttgtccatcaccctggcatttttgagagctgtaatttaaggaagaaggtatcataggttacctctgtggaaattctagaatttgaatattatgcccctgctcacttgtagactgggctgtcactataaagttaggctgacttgactgtatctgataattaggggctgggagagcatggaaaattgaagccatagataatcccagtgtcttgttttagccaataataattcttctcccaccaagtctttatcagaactgctaacaaggagaaaagtcgactggtttgagtttcctcaccttttattctcccctgggtatcttcagtagaggtgctaatgaacagtgaaatggccaaaaggtgagcagctccagggaggagaagaaggaggctcagataatccacaaactgtaatcgctttgaataattgagttaactccagtaaaatgtagagatacattcacctgctaggcattgttggaagctaaattaacacactggaagcaaagctttcttttaagtttcatttttaatctaatggtggacattttggggcactgcagcctattaaatctgctaactgatgttcagacgttatgaaggagttaaactattctaagaatattcaaggcctgttgttctctcctaggctttctacgtcaaagagtaaagtcagaaaagccaaactgatttctcctaaaatgaagagaattgaagttactctcccaaaccccagttgtaggccaggccctaaactgagagaaatggacaacccaaatattttgacctttgcccattgccaggtgaggccagatccggggaggaagtgatgttttcttatctgccttaacttagccactacgtggagaagcactgtaatgtaattaatgcagaggtgctcaaattctggtgttcctcagaatcacctcaggggcttttagaaacagttgctgggccgttctctcagagtttctgatttggtaggactggggtgggacaaagaatttgcaaatctgagaagttcccggttccagggaccgcactttaataaccacaggtgaaaccaatgagaagctgagctccgaagtcagactacctgggcttgaatctcagatctctcacttggtagttgtgtgactgggtagttgatagtttacagaatctctttgtaccctcgttttctcatttgtaaaatgggaatcctaatatctcataggattgtgagtattaaatgaattaatatgtgataagcccttagaacattccctgctctatggcaagtgtgcattgtaggttagtatgacacggttataggctctctgtaacaatgaatatagtgactgatattttttgagcacttactataggccagagattgactcagtactttgcaaggattatcacatttaatacccacaacgcactctccctcctttcccatgtcctgcttgccttctttcttccactttcagttattcctttttcccttccattctttcttgctcttcaaaagccatattgtgacaaaattaatccattctaaatgaaaaagaaaatgtaccttagttataaagtatgacctttgtgagttttttcaggactgttcacctgttctttgccttttattccagcgtggtacccggcacatagtaggagtttggtgaacattaattacttgaatctcgttatccttaaaaatcaaacagggtttatctatcagggttcccttctcttcctttgtcctatcctggcctctccttgaccaacacattggtaaatttggcctctgctctttcttttccccaactgcaggggcccacatgtcaagacaaggtggcatcaccaaccattgagaaagcttttatttcactagcttctacctggaccacccatcaaaaatctttaaaacgagtattccttgggacaaggccaggtgtcattgagagtccccaggaagagcataggagtcctggtctgggagggccggacctacactctcgggggtgcccagaggaagaacagggcctttaaagtcaccctatgttctctgacccgtgcagtggtggcatactccctcccccacccctgacctgagggtgctgtgtgtcagctctcctaactcttggtctcattagggaagctggttgtcaagtactgcccagttacagttggtttaaactctcaactaagggatcgtaagcaggtcagctgcctgagtctccagttactcttgcagctcaggtttccccttgacaggtcctgataggggctacttttgcaccattgatgtggccagggcttacagcaaggtttaaggtttccatgcgcagccttcttggcaggcagctcccagagaaaggagtatggtttgggagaaagctgcaaggcctgttcgtggatccttagtattttgagccgatcacgtggagtgggcctgtgcccatcagtaccaggagactttatacttaggggagaatctgtatgcggtgtgattttcaagggtctatttcctcattgtttctctttgcttgccctatggctgagtattaaatgaacattgaaagtctactatatgccggttactctgctagatactagcagagatggagggtaggatacaaagacaagtaaggcctagtcttcaggaagcctttatttgtgctctgtgtatcagaagagggttgagttggtgacaagaataaagagttgaggggagtgaggggctgaaaaataataagccttagagaactaggaataaagtgttaacttgggaaaattgttgaaacagttccttaagatatttgtagtagatatgtctctagataagaggcttgtctggctgtgaggtccttgcacgagacccttgcaggtttcccaaatctatttggactgggtgtcctgtattaacatgaaatcgtaggcagacactgaataaatcgcaacagagtttcggttgtggctgctccagtgtcttggagtggttgctccagacacataggtcttatcctcctgccctgaggttctccaaatttgcatttgggaagtgtatagttttatgactgtttcttttatcgtgaacttacggccaccccacttccctgcccacttccccatcagcttcaccttgggtcgcggcacatctgttctccagaacatgttccctgccaggaatctgcagggagctcttaagacttatctttctttttagctgttttttttttttttccactcaacttctaggctagtgctgagtacttatatgtcatgctgtgaatatgtgtgtgaatggattggtcagaattccaaattttagttgtaagaaaattcttttgtgcagcgtgcatggctcaaaatgagagaaaagacactgacgaggacttggcagccccgagcttttccttgggatgttatttgctttaataaattttgacctattttgtaacagaccaggttggagttccctttttaacctgctgtttcaacaaagttaagtgcattgaaggtctatctcaaaggcaatatatattttaaaaatttcagaatcctattctgaggctgaattatggctttttcttttcccataggatttacatgtacactcatctgtattacttcagatgttgctgctgtagtttggatgtttctctccccaaacctcatgttgagacctgatctccagtgttggaggtggggcctaatgcaaggtgtgtgggtcatggaagtggatccctcttgagtagattgctgccctccctgtggtggggtgagtgagttctcgctctgttagttctcacagaagcagattgctaaaaagagcctggtacctccccctgcctctctcttgcttcctctcttgccacgtgatctctgcacacgccggctcgcctcactttccgccacgagtggaagcagcctgaggtcctcaccagaagcagatgctagggccatgcttcctgtagcgcctgtagaactgtaagccaaatgaacctcttttctttatgaattccccagcctcagatattccttcctagcagtacaacatgactaagacagttaacttcccatctgactccctccagttgcttcaagggtaggcaagaattgtatattagctatttctacatccagctgtgtatccacagtgcctcttatatttggcctatagtacatactaaagaaatgtttatgtactctagaaatgtactcaagaaatgaccaaatgaatggataacttggctcatgagaattcttaagggcatttgaaatggcaaggggtatgtttggaagaaggagtgtgaggagctgaaggaaaagaggggagaccagctgtgttcagaacccacagtcatttcctcaggaaacagtaccagatatccttggatgtggggaaatgatccactcttgcagtagcctaggccacaggtaattttgtgtacccactatgcacttagctcatacagtaggtcgtaaaaatgaaaatggcatgattccttcataatctaggtggggagacactataaatacacaaataatttaaaagtacagggctgagcaccgtagctcacacctgtaatcccagcacttcgggagggcaaggcaggaggatcgcttgcccccaggagttcaagaccagcctggacaacatagtgaaacttcatccctagaaaaaacaattagccagctgtggggcatgcctagagtcccagctacttgggaggctgaggtgggaggattgcttgagcccaggagttcaaggctgcagtgagccgtgatcacaccactgcactccagcctgggtgacagagccagaccctgtcttaaaagaaaagtacagattatttcaggattaagcatatgagtacttaggctagagagaggcagagaaatgactcctgttttccagccactgtcacactgcagtgtaagccatcgacacacacatacacttcacttcatctgcacagcctttcaagataggtgtttttatctccagtttacaggtgaggaaaccgagctttgggaccaagttacttgtgcaaatcacacagctgggaaatatcattgccaggatttgaatctgagtctgcagcaattcagagaaagggcacgcacagtggcttttgtgtcagggaagagacattgtctgtattgtgggggtaggtgaactacggctggaacaccagcatgcagaggacttgccttttagctctgaggaggtcgcctgcccttgcatatctataaacaaccaccctggattgagagctgttgaatggggagtttgtctgactcccagaagagagcacagtacaggagaaaccttatataacgcagacatgcccggcatcccgcaggcgggcgcaagccaaccgcacacctcacagacccagcttttgttgtgtaggcgctgtggtgtaaaaaccatcctttagggccctctccctcgtggtggcagcgtgcctgggagctttctgttctatttgtggtatctgttccctttgatcattgtgcattgctttgttcctcatctccctctttggtgtcacctgtgaagtcactggagagccataatcatcctaaagaaagactcagagaagaagaagtaagacctaagaaaacagaccctttagcctccttggagctggttttctagttaagaggcttgattaaaagcgtggggggaatggatctgtgacgtacatggtcatgaaaagtgcagccagcgttacagcacacgtctgtataggttgcatcacaggcagggaagaggcctaagggcctggtggcccgcaggtgtgagcccctctggtggctccatgacaggagaccccgcggagaaagtagctcctcttccttttttaaatttttttttatttttattttttactttgagacggagtctctctttgttgcccaggctggagtgcagtggtgcgatctcagctcactccaccctctacctcccgggctcaagcagttctcctgcctcagcctcccgagtagctgggattacagacacgcgccaccacgcctggctaatttttaaaattttagtagagacggggtttcaccatgttggccaggcggttctcgaactcctgacctcaagtgatctgcccgcctcggtcttccaaagtgctgggattataggcatgagccaccgctccccggcctccccttcttataacacttgaggcctgtgcttcagttcatgggccttatgtaaaggcttctgtcacctgtctactccttcttcaagctggctgtttattcggcacagaggagtaaattacaggtggattatgcagtgacaagcacttttatacctcctgtaagaacagtttataccaggggtccccaacccccagaccgcagactagtactgtccgtggccttttaggaactgggccgcacagcaggaggtgagtggcgggcaagtgagcattaccacctgagctccgcctcctgtcagatcagtggcagcattagattctcgtaagagcacgaaccctgttgtgaatgacacatgtgagggatctaggttgtgtgcttcttatgagaatctaatgataaatgtcatgtgcttgaatcatcctgaaagcatccctctgcccccagtccgtggaaaaatgttcttccaccaaaccagtccctggtgccaaaaaggttgaggactgcttgtctatgccttaaaaaaaaaaggtccatttactttgcagtcatagaggacgcagggctggacttgaggaaatctacctagaaatccccttcaggttaagatttatgacattagcttcactattgaattggatcatagacatctataattaaaggaaaccatttacactttattgttcattaaatgtttaaaccacctgaaaagatttttttctaattgagcctttttgcatagttaccagttacccgtatctgacttcaagtctttagccgtatacctacatggttccatagttatcaatgtttatttacaatttaatattcttctttagcattatttaatatcaaaatgataatatgtactacggtaggttgggctttacagcttacaaaacactttgacatacattctctattatttttgatggctctgtgacatactgaactgaagcaacagtttaaggctatttctaaattgggctctgctcaagtgtgagaaagcgtgacagtcaacatgaactagctttagccttatcaccgtttcctgctcaggcaggtaagatctgctgaaggaaggaaccgttgccaactggccaggtgtgccagttcgtggcctagaaggggcagctgtcagttgaactttgcccatgttttcaggattttatctcaactcctgagtagtctcatctgggtgggagcactagaattgaaggcctgttcaaaggttttgtgcctttaactggagaattttttggaagccccttagaactgccaggcagccatgtgggatcaggtgggggggactgggctgctgtgtggtagatttgagttcatgtctcataaatggactctccccgaatctgagagggttgctccctaagtcaactacttaataattaatggaaaggagatgtgacaggaatagccaatttccctgtcctgtttggtatgactgttggcaatttgatgattccttccttaaccttgaagcaatctcagtttgactgactcatactatggggaagatagtggcctttgaactcttgactcaatacagtcttgaccttggttagatactaccttgacctctggataaaactgtactgggcattactattttattgattgttctctcaacaaaacaaccgtatctttaaaaaatttttttatcttacatgtctgaagtagaaggtcacctcttttgtagtgaaaaaataactattttccccatggtgtgctgaatgcatgggttaaagcaggtagaccagctgtcctgggttttatccctatgtgttttttgctgattcacaaaggcatttaatttctctctaccacgctttctaggtctgcaaaatagaaaggggagttcatgaccatctatgcgttactgggggatttttctgtgcaagcgaaaattattgatgcaaccagaggacttgctgccagcgtcgaggggtgcattttactccctctgtaaagaggccagcagtaatgatagaaacacagtgcatttgactctgaccttatatttgacaactcttcctctacaatccttaaaaaacatgcctcaccatttaagagaccagcagcaggccttcagcaaagcccacggtctaggcagcctttgtaggcctctgggattgtggtgagaaaaccttatccctctcttatttcctgataactttacattttagaggtgtctggaaagaaaggtggcagaaaagcagcataacctgcttgacaagtcctgtacaaacagaagtccaatgaggctgctgctctggggttgccaagctcaaggaagccaattgtagtgtgcacaaaggtgcaagtcaccaaggcctcagagagctccaaggaagcctgtgcaaaggcaggatttagagttctaaggacgggttgtccagcgcagcccagcagagaacctaggtccataactgtggactctcctgtgagggagccatgttgcggggtggacatctgacagttgtccctgctctgtgaacctgcgacttcatcctacaggtgcagagaatggttttggcaactctctccaccgcagaatgtgggcggacttctgagctgggtttgattttcctcttttgctttggagtgtacaacaatcaaccctttagagcagaagtagaggaatggaagactttcccatggcccaagacccctcagtgggttgctgtttgctcttccctagaatattataatgttcaatttatgcctccaggagaccagagacacacgtttcccaaatgtgggtacaggtggctttaagctgtttctgtgagtagaggcccagtgacatgttccccagtgtaaccccctccttggtttcacatcccctctacccgattctaggccaagcccctccagtgtagttggtgacccagaacaggtgaaagtgaggctgccttttgtagcactgctctttgtgaatgggaagtgctgctggggagaaatgattttaagtgtgagctttgctgttaggggcagccctctttctccactgcaataagaagagtcatgactaagtctagaaaggcaggttttgatctttaggatactgtgatgtatgaaataaaggtatgtccttcttattcggtgttgcattgtcagcacctaacacagtgtttaattaaagcaaaaatttttgtattgaaaatataactaggtggaggagtaagtcagtgctacttaagtgtgagtatttgtcttccctgatcagatggttttctacgtactcaaaatttcatgtagtaagaatgcaggatgcttatggagaaaagtgagtgttgtttgtttctccttaatatttatatataaaagcaagagcttattaaacttttagacgtctttggaggtttgaaatttcccactgttattcttaagaagagaagagaaagaataattttttttcttctgtcttattggcctttaaggaaaagcgaatttcagaaaaacatgggacggaacaggaagtgtttacaggtttagtcatacttgttaggtatgaaaaagccccactgccttctcatattgtttcttttatgaacttaacacttcctactttgagaataccttcctccccaagggctcaaagcccttcatagtcattaatttgcatcttgctaattttcttaaaaaattaaaatgttaactaccatttagctggtattctaccagctaaaacttccagctaaatgcattttgtctgtctgtatgtattagctcagttgaaaatgtgatcctactgaaggcagtagggtaaccggcttgtcccagtttccctgggatttcagttttagtactgaaaaccccacatccccggaaccccttcagtcccagacaaaccagcatggttgggtcacccaagaaggcgaccagttcaggtagctctgcataaagagaagatgttccaccctgcagtccttaccttaaatctaggcagctaccttaagaattgacctagacagcagtgtgtgcatggctcagtgcaaatctttagcatcacctggtagaagacaacactgagcacacagtcgcagaactagtgcagttcgaggtacgtggaaatgtctctgcaaagtaatatttctggtttcttgtttttttgtctacccttttcccctttactgcactatatggtgaaaaacgaaaacaagaactgctaactacctgatttccgaaacaagaagtgtgatctcaaatatttctgttgatctcaggtttttcatctgaaaaatgaggatgctggtctcaatttctaaggccccttcctgcccaaacttaccaggaggaaagaagctggaagtagaaagcaggagaggttcaaaaagaaaatgggatgcatctcctttagtaagctctactctggagaaggacgttgtccttcaagtacaaaccttttcaccgacttggggagtttccccccattgtatcccaccccatctttttctgccatcgtgcactgtgtcgtttgaatgtgctgctttgtcagggctgggggcttccttggtgctccagcttggccacatccgacacacagaccaccccgtcctccttctgcctctagaggaccaagaacaacccttgttctgaaagcaccctgtccctgagcctgaacacatgaccctggatgtcagaagatgctcttctccatttcaattgcccaattccagctctgtaatcattatgttaaatgatacaagtttcaaaaaatatatatttctaatagactttctattatcttccttaaatccacagtgtcactttcattcttactcctcattttggggtgaaagtgtagaaagattgtggctttagaatctgacgtactttgcttcaaattctagcaccactgtgtgacattgggaagcccgttctttaaccccactcagactctgtttctccattgatgaaatagaaacatacagtatcttatgtgtctggcacatggaaggtactcagcatattaatattaaccactttgggctgggcgcagtggctcacgcctgtaattgcagcactttgggaggccaaagcaggcggatcatgaggtcaggagattgagactatcctggttaacacagtgaaaccctgtctctactaaaaatacaaaaatttagccaggcatggtggcaggtgcctgtagtcccagctgctcgggaggctgaggcaggagaatggcgtgaatccgggaggcagagcttgcagtgagccgagatcgcaccactgcagtgcagcctgggagacagagcgagactccatctcaaaaaaaaaaaaaaaaaaaaaaaaattaaccacttcattcttcttagcccttcaagcccccgcaccgtgttttctgacatatcatcttgttttcatcctttctcttcggtttaattccagagggtacagagaaggtgtaagttacaggtaaaggagagtaagtgcactgtgagtgggtgctgatgaaatatcacaacaggttctcattctgacaactcacactaggccatgcttccccggaatatttatggaactaagtggaaaaaaggatctttagcaaggatccagcaccctcaatgcagggaatgaaatgtgtttattattagagcaatccagtttccatacagctaccaatatacacacacccacataccctgttcagccatactgaagagtttacttgtaaatccaggcgaagctgatgctgagaggtggcccgctgtactgattttgtaaaaccagcaggaaaacctctgctcggccgaccacttgatgttttagttgcagccactaacatgttaatcaaaagaagcaaatacatgtttttcccttgagaaaacatggatagtggtgtaacggaaattaccttgaattattcctcctcaagtatctatccaatctagatagatggattatctgattgcaccaggagatgcagacctggcagtggctacttctattgcagcatctttaaaggaatcagatctttggatttccattttcccatttttattcttattttctccctgctaaaaaacagtttgcagaggcacttgaaagtgatataaactccatagtagataatagttgtacatgaacatcgtatcttttatcatatagtcccctatgtaattaggtgatagcttgagcctagcacaggtggcgctgctgagccatctcggaaatgaccacatctgaactgggcgcagtggttcatgcctgtaatccccacacttcgggaggccaagatgggtggattgcttgagctcaggagttcgagaccagcctgggcaacatgacgaaacctcgtctctacaaaaaatataaaaattagctgtgtgtggtggtgctcacctgtggtcccagctacctggggggctgagatgagcaaaaaaaaaaaagaaaaaaaaaaaaagaagaagaagaaattaccatatctgtatgtctatacataggtatgtggatttatcacagtgctggtacaagtacttttgtcattgatgtttattaagctttttatgctccaggcactatgcaaaattgtagggcattatctcctctaatcctcagaatcttatgcagtagggccggtgttgctattactccattttatagatgaggaaacttaggcttggggtgtttaagtaacttctatgaagtcacacagtaagtgctagagccaagaggcaaagtaagcctggatgcttccaagccgtagctcttaaccactatgctatactgctcaaaaatatttttagaactgaatgaagacatctaaggaaaaggaaaacgtggtccctaatggtcttttgtgataacaatatgaaacctttcgtctctaaagtgtcatggaagtgaaacttgaaaggctctgttcttcatcttctacttattaatgggcaaaatgtcttcgtaatttatggcatgtgtcccaaaggtgcaaaggtggcaaggtggccttttttttttttttttttttttttttactaatactaggtcctgcttccaagcctcctatttcttcacttccctgtgtaccagggtttacctgctgcttaacccacccaccccactatacgtgtctgtagtagacccaccaacattcacatggccacttctgctgaaagtacctcccaggatagaatagggtcacagacccccaattgtataagcctttggcttcttgatgtctctgcgagttacggttatgggagttggtctttggtgagattagtggtgagatcagtgggtggcacctagggtgatttattgaatagtatggggtgaggctgaagagcaaacatccacgtaagtgttgtctgttttggagtttgaaaagttgtcaccctaataaacaaactacttaattgaacagcccttgcttggcgtgatcaaagaaaagacctagactttgctatcagtaggctctgggttccaggcctggcttgtcacttacgatgatgatgatgatgatgattttttatttttttgagatggagtttcactcttgttgcccaggctggagtgcaatggcacaatctcggctcgccacaacctccgcctcccgggttcaagcgattctcgtctcagcctcttgagtagctgggattacaggcgcccgccagtacgcctggctaatttttggtatttttagtagaaacggggtttcaccatgttgcccagactggtctcgaactcctgacctcaggtgatccacccgccttggcctcccaaagtgcggggattacaggcgtgaaccatcgcgcccggccagctcgtcgcttattatgcaagttgtataacattgctgaatcccaagtttttagtctttaaaatgagaatttaaatgtcgcccttattttgattgctgggaagtttaaatgaaacagtgtatgtgcctgtcacatagtagttgacaataaatgatagtttcttttccttttcccttaagtaagttttttttccctctagcctataagctccttaaagaagatagagattttcttttctcactcatttccatattctcagcccttagcagtgccaggcacatatttgctgaatgaaagaaaaatcttttacaaaggtcttcagatcattcattcaccagacaattgttgagtatctacagtgtatcaggcactgttcttggagcagggcagtcttaaaaaacacacacaaacatagtctgtgtccccttttttagtctaactgggagagaaacattacatagataattagagcaatgaacaactttgatccttgagatgggatttaaattttaagagataggtgacatttggtgtcaagtctgtccaggtatacttgatattgtttttgatcaggtacaagaaacggcaatatactgttatctataactggttctgaaagatctgaaagaggtgtttctaaagtatttttgaggaatggtgctgcttttttggaataagtataaatacattgtaaagtatctatttcgagagggaacagacttgatgggatgggatcatagtaggtaaggtgttccaggaacttggaacatactggaataaggcttaaacacaagtcacagaactgggtgatagggcggtgagcgcatctactggagaggagatggggcagggctggcagcttgtagcaagatttttatgtagacagttagacttcaaacttcatcagtaagtcagtagatggccctaggtggaaacacaggacaaaagatgaatttgtgttggcactagaaatactttgagctcatctaatgaggctcattcattcatttggtaaatacttcacgagtgtccagtgcaagctctgttctagttgtaagggatatggcagtgaacaaggcagacaaggtccctgtgcctgcagagttttgatgataaccttcccccctgggtgtgtgggagggcctggggctcctgtgtggtttgggggtctgagaggtggatgaaggtacagtaggcccacagtcgtggaaatcaaagtccaagctccagtgaaccatcaattaagaaacaagggattgtgaagaacaagacctagatccagactgaagggaaggatttgctgaggagttcaggccagcatgggctggggtgacttggcctggaactctacaacagtcaggacagggagtcctgaataggggcacctgcagctgagtccatggatggggagggacctgtgtaaggcactgaatttagactctgcacgcagttctaagaggtgttctcaacacgtttatgcaactaaaaagtgtttattaacagtgttttgaaacaagtgggatttttgttgaggttgtaggataattcagggtcatatggagatttttattctatcagtatttgccctgtcatgtagatgagacacgttagaggcaagcctctgaaaattagattgatttatttttctagtctgaaccgaggaaaataactacttgtcttctatctcctggtgctctaatatatgtaaaatgttgtcttatggtgagacaatgcatattaattttttaggcacttgatggaagaagtggatgagggaagcagcatcggtctttgaacctaggtcagaaagaaatggaagccatggtgtgagaataatgcatcatggtttgtatggcctttttcatgtattttaactcaactgattttctcagggcctcatcagtcagtcaacgcagttttctccatctcatagccaaggagactgagactcagatctgcccctgcccactttttttgtagttttagggggaagcataaatgtggaggaagtaaatgagtgtgtttgttcaggcttagacttttgttattttttagccttgcagggaaggggaggaaagccaataacgatggctagaattggagatagaatgaatgcaagttgcattaaactgtaaggttagtctcggtaagaggttgtttatatggtggtgtcttgggtgtatcttaccatgtagcattcttcgttttaagaaggattccttccggtgcaacatcagtcacagcatagaaagcctatgctgctctgctagtttgcttgcttgcttgcttgcttgcttgctttctccttccttccttccttccttccctccctccctccttccctccttccctccttccttcctctctctttctctttctctctctctctgttttttgtttgtttttgctttttttttttttttttttttaaatttgagacagggtcttgctcagtcagccaggctggagtgcagtggcgcagtcatggctcaccagccttgcacttcttgggctcaagtgatcctcccacctcagcctcccaagtagctggaatgtaccaccatgcccgactaatttttaattttttttaatggagacggttttgccctgttgcccagactcatctcaaactcctgggctcaagtgatcctcctgcctctgcctcccaaagtgctgagattacaagtgtgacccactgcgcctctgccctgtgccacttttccacagctgctttacctacagcctgggagtcaggccagcaaatgacgacaccccaggcacagacatgctctctaggaacttcgagtcaggtatttcactttgtaaagaacttccattttaattctattttctcctagttagagactcatctttcttctgaggggtgcaaatgattctttggagaagtttaaacctgttttacggttcaaactcaagatggtagaaacaagtcatatccaaaagagtgccccgagctctaagagttgtggctgcgcaacgttttttaggtgtctccgaagtgttatggccaagttcaggattgacccagatgaggagaggttgcactgcatagtgatgatttgtgttggggaggagagctgaaactttgcaaagtggcgtcctgaaccaacttgtttttcagcttctagggaaatttgttaggtaatttttaaaaaaagagagagagagacagagaagacttaatttgatggagcctaaactccactgtcttctttctgctgagtgctaaggggctcatggtctctgaggacagagggcaggaaaacaccttcatgccctgtgtcctctgtaaggggcctctagtatgagggactctgatgactattgctgttggggaaaagaaggaaaaggaacaggggtcaacttctgtcatcatctctccagagtttatgatgtttctgaaaggatggggaatagtgcgtggcccccactcatccctgtgaggtgctgcccaggtatccaacctgcagtgcacatgctcgccactggcactggggatggtgagtgcagcagagagatgggattcttaatttattcaattttaattaaaaaacacagttcagttgttaaaaacctatttaagtgtgtttggaatagcttggatatgtgaatttaccttttcaactgtgaattttatgaactctaaatacagatcaagtatttccagcaaaaatttagtgtcggatttgaaatgtgctctaatggaaactagacaccagatttcgaagacttagtatgaaaaaaacataaaatacctcagtaattatctgtattgactatacattgaaagaatattttggccacattgagttaggtgtcctatgttatttagatgcattttacccatctcttgtttttcatgtagctaccagaaaatgttaaattacctatggggctccccttatatttctgtgggacagtgcgagtctagacagtgccttacgggatccatcagaagcattattggactttctagggaaagttgctggacttcaaaagttagagtcataatttttcccgttgtgttaacaagttgctttatgtggatgggtttatgacaattgagggttggaaaataggttttaataagagtaagttaattgagaggacagctttacctctgttaatcagaatgattttaaaatgcattttcacccactcagaaaccactgattctcatgggaacaaaaaactacattcgtgcgtagtacgaatttgtgcctgctgggtccttgtacctttacgccaggcagaaatctccgtaatcgtcagtgtagatttcatttccttgtggcaaggaatataaagtaatacaaccaaaggggaattccactgcatgaaaggaaatattagtgctcgtctagctcttgtttcaaccctataagctccaagtgattttcagagtccctccttcaacttttttgttaaactttccagattttcctatttatagatttcagttgttggcagctacatgttggaaccgttgttgaagcccctagtaagacttgatgctgtagcacgctttcacagcttggtttgcaagttgctttctaaagatgcaaagagaattactacccactctagtagtttgaacaacccagtgaatttcagatattaaagccatattcatgccactgttctcctaattctatcactgtttagaattgcattttgtctaaaggaaggatagatagaatactactaataatatcaagatgctcagaaactgttgagaattttttttacaggaagaacttaaatttccagaggcttttaaaaaaaaatttattaaggaaggagtaaataaatacgccgggttcttgagtaaactacttttacccttcagaaccactttgtacgtagactttatcatgatggccaagagtttttaaaatactataggcagagggtatactctagagaaagaagacaacattgggtttaggactgctagccccatccagagcagttatgtggttcattcagggatcttcttagcccttcaacctcaatttctacatctgtgaggtaggttttgtgctagttctagtgacatgactcgtgggtgtattaggaggatatagcagcatgtaattgaagggcttttatcttggaaaagccttagtaggctcaaggtttctagttgtttagggttctaagattttactaactagtcagctgcttggagttcaaggcatttcttcagattataatgagttgatagtgcagtgtgcaaaaataaagaccgaaccatggtaagtagcaaggttactgtaaggaaaaaaatgtgtcccactggcccctttaaaatggcacaggtgcatctctgtagcaaccttgacagccatcatgtgggatcattcccctcacccagggaacagtggttccccaatctccaatctctccattctccagcatgagaaagtggtctggagcttgatcacatgaagatggacagacacagccttttggatgcgagagagggaagggaatgcaggccaaaagtggggtgggttttcctttcctcttccttgttttttattaaccttgtcttgctcctgccacacacaagtgcagccagtgctcaggacactgctccgtgtggagctccggaaagtgaagctgagaagccttccttggggtggacatggggggagctgcagaggcaatagggagaaaataacaaccatggctcaggcactgcttggagcagttgttcatatgtaggtcaggtagtcatcattcaggaacttcctgtattacacaaataatctctattttatggttaaaggtaggacagtgataatttactcaggagggaaggacaattagcaaattgattaataaggtttctaaaacctattgtgaaagagaatcctttaacatatgtcttgatttattctgcttatttatgtcttgatttaagacagtgattcgcaactttagctctgcatattgcaatcacctgggagctttaacagcgttcatgcctggctcccatccctggagatttacttggctattgggattgtgttttaaagtttctccaggtgattctaatacacagataatagccagaatgcctgatttaaaatgtttcctgaattgttagctgatcttgagtgcatattttctatgtactgttgcacactaatagttttaatgaaggcacagaatcttatgtaaaataaactgttaattggtcttaactacagggctacaagagtttccttcttatttcaagctgcttaatattccgttaatcactgttgtcatgcacacacacttctgtattccattctcattcatttactttttagaatggtattaatgctggtggcatttgcagggtagtagtcaccttgtcagtagaacttgctttagtaattagttgtcagaaacaaaactccccagactttctacccatgaccacaatgaagggaatgatgccttttctgagtccctattcctaagaatcaggaaatttctatgatatttgacaagtataggtagaaattacttgccaaggtgattatgacttctggaaaaaatttttttaaaggaaacacaggtgtgtaacactcctaatcagtatataagattgtttgtatgttactttttcgagttataaaaggaagaggataaattctgcctccttccccagttactgtcaatcttcagtcttcttttgaattaagttagtttcccattttacaacataaagacaagtttaattcttaaggcttacataaaaaagtaatgtttaatttgggatttctcaaattcttcatcataataacaccttgcattagtagagaacctttgttgcaagaagatcaaaatattttataagcttcatctcatttttcttttctttctttcttttttttttttttttttggagacagcatcttgctctgtcgccctggctggagtgcagtagcacaatcacagctcactgtagcctcaacctcctgggctcaagtgatccttccacctcagcctcccaagtagctggaaccacaggcacatgccaccatgcctggctaatttttcatattttttgtagagacggggtttcgccatgttgcccaggctggtctcgaactactgagctcgagggatcctcttgccctggcctcccaaagtattgggattacaggtgtgagccactgcgccagacctcttttatctttgagataataccgtgtgacgacaaaggctgggtattgttatccgaatctctcacacagcaacactgaggagacattgactcatttcttttacgttgctttttaagtacagtattgtttggttttgttgaaaattattttggtagtaaacattttccagagatataaatcttttccagactcatttgcgcttgttactgtaggtagaattcatgaggcttttcctatttctgtttatttcggagcctgaagtgacccaggaattatgtgatatatgtagagcgagggaatttcttcagtttgactgtggtcctggttgtaacccagccttcttccttacagatgggggtgagggttggggtatcccttagagcctggtgtgtcttcatacaaacagctttgctggggctgcctagagcctgggccagcagtggggtagtatcaagtacagggcattattcagcggttctccacactctcctcatttgaatgagaatataaatcttctcccctggctctcatgtcacatctttaaaacctcaagtttcttattaggcatgtgtggtccatttaagctctagacatttcgaaaagataaatcacagggcaaaacatctttctagttttgaaggaggtctgagttgcagctcgctggggttgtgagtctgagccgtcgcttttctttctcttccttttacaagacttccaggatatagccgttaaagaaggacacaaaaaagagcaaagccctcagtgatgctgtggcacaaagaagaaagctacttgaggaggaggcgaagggtttacgaagaggcaaagaatgcaggtgaagggagggaggagttaatagttaaggctcaggttccaagccctttgggctgccagtgtctgcaggagccttgctttcatcctttccttctgcccaggttttaagtctcatgagttaaaacctggggaagctcccaccccaggtccactgtgagggaacgtacaagaacagtcacgtggcaatagtacatgcctggaaggtatctctcatttggggggagattgagaagcgctgtctaatggtgcccttgatacaactaaatagcaactgtctcagttcattacttgttagccccaggcagggacaacgcagattggctaattataatagccagaccattaaagggaatagcattaatggaggagaaagcagctaataaagagctgaacttggccactttgttgtgcccaggatacaagctgctgttaatttcagtacctgtttcttctgctgttagaactaggaagaaaggatttagtgaccctctttcaaaaggtggatcacaagcttagaggcattgctggataaattcaacagcaagactttatttcttccccagaggtgacgtctgatggttctgtataaataaagtcacaccacctttcttatgctgaattgatgctgctgacctgctgttagtaggacatgcacttttatggcgtttccaggagtggtgatgtgtgttgctgagctcatctaatctctgctttgagcaaaggcaatcctctatatcatggcagggattagaggtatagcctggggctgcagaatggtgtgatttaaattttcccatgcaggttcaaagcttgtaactttgcctgcgtgtacatccacactgggttccagccacatgaactgggccaccttcatagacctccctggtaaccacagcctgacgtgacaaggaatcacagttttactttccgcttactatccatgttagaaatatctaaggaaattcaggaaaaaaaaaaaagagagaatttcatggcatgtcaagaatggaaagtatcttaattaaaatgttttaaaatgggaacaataaagaagtcgatttaagttttttgctttggtgcttgtctttaaagaaattgctcctaattctagaaactagtgctttttctaattatattcagtagaaccctaggatcctgtgaggaggcataggggagtaattgataaagaaggggactgtggtgtccgtgttttatttggagctgttctacccacactgtaatttataagctctaacttaccaggggagataagattgtatagaaccagcatcttgcagttatacggaacctttaagttctcctactccagctccttcccagtgcaagcacgtgttttagagtaactgttcagcctcagcattaagtcagctttaggagaacagtaaatcgcccatttatctggagacttcagctgtttgaaaggccttccttctagtgcatcggtatctgttgctggctctgtcctctgctactacaagcaagccttgagtctctcttagacttgtccttcctatatttgaagacatctccgagaagattttaaatcttttttcccccacaggccacatatatccttaatgccttcatccattcccctcttgggaatgtgcatctttgggccattggagaggtcttgcttggactgcggccactgtgatttctgggggcagactcagctccttcttggtgtagagatctgcccactataggcaccaaatagatgttggcaggcttctttcctccttactgcttctatttatctcacctgtacttttagatttgctgctcttgggtaagcagataagaacaagggaaatgtcttccgttgttgttaaagacaatgttaggatagaaagtaatatgtttgtactcaaaaatgcccagtgagatttctagccacggccaagttatcatttgcataagcaacctggaaatgccctcttggtcctactgattgtgtcccatggttaatgtagatccctggataaattcgaatggctactcctgctcaggggtcatgccatgagaacttttctcatacatcagatagagtccccttccgtcagctgaatgcatttacccctcagtctgtgctacccataggataagcaacatgcataagaaggtaggtgccttggcttaggcagctctgttgagtcaccctcaagaatcctgctggaattctgtgaggagtgaggatgcagagcaacgaaatattcgaaggctgctatgatttttacaagcttgaacctgtctcttggaattccccattgtgaagtcattgttgactggttggcattataaagcagttcagagaagtaaagttagatcagtctgcacgcaaataccagccacaccatctcccaagctagtgactggaactgcggttttcaagtcagtttcctcattgcggaatggagataacgatgccttccttgcagggtcattgtgaggctgaaataaaataaaggcttcatgggaacacataccacatgctcacttaatgctagctctctttcctgattgtggcagtgactgtattttccagctacaattgtgacacgtgttctgagaggtgttaagtatttatatacaactacccatatgtatttatgggtaaaaggacacggaactttaaatattgagaccatcctggaaattctaggatgtatgattgcataatttgtaatgcctgctataggcctagcctcatagttgacccttgatggatgctgaaatatttcttaatcatagggagaaaaaaaactcaatgaccttttacagagatgtttgattgcagggcttattgctaatgctctctctctctctttttttttttttttttttttttaatctcactatgcaaagataatacaggtctgggtaagaggaagacttaagatgctttgacttaattgtatctgcttgacagaagcaatatactgccttctgattttaggatgtaaccatccagaaaggcagaagaaagggacaatttcagttctaaacaggaatccgaatatctcacgtcctgaaccatctacataaactagagaaagggcactccttaagactggtgaagcgggctccttggaagatccccacagcaacattgagtttggtttgtctggcgtaccctctccccaagggctgagtgggccatctgggtaacctagagaggagacttcagatgctaggagtatagttcctacccatcctcattttcacagggtacactcatttttttccccttggaagtactgatatgtattctgcaagatgaatgttgagacccaaacaccatttggcttgtaaaaattaatggcttagcatccagagggatgttgctttcagggcaggggggacactggacaccaagaagaaagccagcttgggcccctataccatcttggatgtctaaaccatcttctggtaactctctggatgaaaagaaatcatgaacttcacttctgtgatttggtggatgtggattttgctacatcaaaatttgcatttgagtctctgtggtgttctttctagccgagatgctagggtatgctctttctttctggggagattccaaaaatgttactctctgtggctgtgtgtacaatgtctatttagaaaagaagactggcatttgcatcttctctcaaattctttacgtttgtctcactgaattttggagtggacaaaatattcaatagcttttttcaagtgaaaaaaatgtcgactttcaagagtgtattactttaggttcttgtgtatatctgtgctttcctggtggcagaaacctagaaaactctagagctcaaatttcagcgtattcaattttttgttaatgtgtctatagcttgttaataaaagcttacttaatgaaagccaacatcaccaccacttgaaatttttgcagccagaagagtgtacttaaatacttgtgtattcagacttcactttaataaatttcaataaatagcttcccataggagaggtttcttctgttgaatctgtagaagttgacgacggtacaagcatcagctttctcaggcagcttttctaaacacctgcagggtggaaaagagatccttctctcaaaatactgaatattgctggcatgaccactcttgtcactggtgcctgctgttttccatcttatctgggttgcaggtttcttcacagtgatgggacaccgaagtgcaatgggatgaaagcatgcctgtggcatttttaccctagctgtggggaaatgaccactatcctgtgtccatgacactcttcctcctcaggactttcaaactaggcttcagaagccatcactgggggcagtcctggcatttataatggggatagggacaatttccaggaaaagtttctatatcaaggacatctcagttctgcagcagagaaatctttgaaattacctgcaaaccatctttttgcaagcacaaccaactttatttctgttttaattaattccaaaaatgctttatttccagaatgttaatatttagttagcagtaggctctaagtttcccaacccctcagccttttcagagggtataataataaatgtgtaaatgtgctaggggatccccgtgatttatggaagctttatattgaataattttgaagaggaaagaccttttggtaataatattcattttttgactcttctgtaatatgcaacctgagggtgggtgtgggggaacgtggagaaatgccattctcctactgagcacagactgtatacacctattttacagggaagtcacgggctcctaagcattcagtttaaaaatgagcagaattagatgggtacccttcattggcccttcatggctaggggagaaatgggagagggaacgcagctcattttggcttcagtccttacgctttcaagagacaaccctactccatacttcattattttttttaaagctttctataatggttggtgaaatttacatttcaactcttgcctacaacagttttctgccttattttctcttcccagcgctttgtgccgcctccttgacaacctgctcataggtattacaattggcctcagaaattgcagtgcttcccttttgttcagctggttggcttgataggttgtatctgcaaatttgagagcagcgtgttttattttttacagcatctaaacaataatgtaaccacatcacggcattctgagtcacatcattgacctccaccagcagtttatccccctacaacacttgaatacattaatatcactgtctgtagcattttaatttaattagagcagcggttataatcctcttgggaaaatcgttatcccccccatacacacacacacacacacacacacacacacacacacacacacacacacacacacacacacacccctactccccataatgttaaaagaaagaaagcagctctggttttcatctgtctgacaatttgctttagaggtgggactctcaccaccaccccctcctttgttggggtcgcaccagagaagcagttgtgagagtaaagaggttccctttatttgggaaattagacgttagtgtccttaaacttctctgtctagatgtctccatctgagatagtggtatttggttaatttttccaattgctgatagtctgctgatgtgccagggtagatgttaagtgcgaggttattgcaatagagtgaaaaatgagcactgtgagagtcaacctagagattcacaaaaagagagacaaaaggagtctctgtagtgtgggattcccaagagtgtgttttgttctccttggaacagagcccactcactgtacagcatccttttggggtccccaagtgctctgcagccaccaagcccagagttaccttaggtgtgccatggctactagaagagtgctcggggccctagaagcacattgtgcatttgtccgtcttggtcaaggtaacctctcttgttgctgacaagtctcttcattgagcctttgaaaaagagcttatggtgtggaaaactgtcctccagctgagtagaaaccatcatcaggaatgtgaggagatcagtgggccacagtctcttcatctctggccttccttttataagttttcatcatgaaatagcagttgtctccatctaaaattgtttggacggggtttgcgggggatggcgtcagatcccagagcaggtgcagaagtgtggtgtttcaccgtaaggtcagggaaccatgtagaagtgaaagcacaccaaggggttacttttaaagagagcacagttgaaaggaaggtccaaagcaatgataatttagtaaattacagtatatacactttcagggtaatagctagccagactcttttgtcagctggctggggatggagttcctaagaaatgaagtccagtcagcatggagggccgggtttctcccagcttgccttggtggagttggggcaggcggggatgaggcggcctcactctcatggactagccagagtgtcttgtgagtttctctttgcttcaagggaaagaagagtcattgaatttcgaaatgctgtcttgtttttttcttgcactcatgaagcaccatttgaagaccctttggctgcccgatgttttcttcaccaagtttcacttctgcaaaaaccctaacaaaacagaaagctatttccgagaataaagttaacggtagatatctagacatatagtgggatttggggggtgtcagacaagagttgaagagtatggagaatttgttaaattctaaaaacagactgtttgaaatgctcagaagcccacctcacctttaaaaacctctgaacagattttatgtttcctatatgtgtgggctttttttttttttttttttttttttgcttttttcatcccaaaccaaacaccaaaaagtataacccatccttcaagttaaagtttctcaaaatacatgtgatgcctgctaaagttcaagaaaagtgcagttgaaagttttgcctctgggtgactttttacaggacatcttaattgacccagaaatgaaacctgggatatatgtgcctgcccttcattaagaaattcaccaagaaacctcaggatgtatgtttaaacagaaatattccaactgccctacttgcttctggtgggtgccttagggaaggtatagcaattccattcggaaattataacaatatgtatatattcatttaaaatcaaaacttcctaccacaactgccagactttctaggctatgagcagaggagaagctttaatttggttataggccgaggactccgccgcttccctttgcacatttgatgagatgtaaaatgttaaagaactatctttccaaaacgtaaacactgccttccctttacttaaatgtacgattttcttttgctcttgagttttattttcatagtggcatcttactggtctttcctttccaccatatttttggatgttgtgtgttccattttacattgcccagttaaaccacagacactcctgaagtcatgtttacatgtggactgcaagtcaacctagttggcatgttgatctaagctacaaattgcactgctgttttgccgaacccaacagtcggtttcttgccattatttgcggtattttaacttaaaactcacggtaatccttctcaccccatctagtttgttttaattgatctaacaaacactgcttgtttgaattcaaatggaggatccatggaagctctcccaccccaccctttgatacttgataaggggtcaaacagtacttcttttaaattcagataattctttgaatgaactatgaaatacttcagagggaaaggaaatatcgattctgagatggagagtaaaagaacaaggagatattcattattgttgcagataattcctagcaatgaaggaaaaaattagacgttggatatttttggttgtggtggttgtatagtgagataggtggacaatagaaaaatcttccttgtggattgaagttctaaatctagaacttatctttgaagctgtcactttacttgatcagctcactatggaagtgaatctagaatcatactttgattagaagctggggatattgctacagaagagaaaacatggctttaatatagtgatggcattaattatgtgacttgggcaagtcattttttaaaaagttgtctttaagccattctcgcggacgtattttttttgttcccttttgtccctcctttttacttgtacaaaccacagggtgtacacctattgacatgagtccaaagtaaaggctgttttcaacgatggcagagttttgttatatagccccaaggctaggcatctgaaagacaactgtatacagtgtctctacggagagagtaagccggattgcttgggaagctggtactgcccatgccccgcctcccttttgctccccaccccgagatggtctcatacctccattccaagctttcattgtctctctccccctcccctcttcctgcccttatttttaacagcaggaacgaatttcatatacacctccagagagcccagtgccgagttacgcttcctcgacgccacttcatgttccagtgcctcgagcgctcaggatggaggaagactcgatccgcctgcctgcgcacctgcgtgagtgttcgtgacccgagagggacagaggattgatggcgtggggcgggggtggcaggcagtgggctccaggccagagaggggcaagctctgaggtggttttcacaggacttcgccacgctgctttggaatctttcacacccccctacccccagatacctttgaaaaatttgaggttcctgttccttgtttctcagtgtattcatttcttccctgactatgacatgttaaaaaaaaaagaaacctggaaacatgcagtatatggcagagccaactaaatctcctagtagacaagatgatttctgtgtgtgtgcaaagtttatctgtattctcaaattcacgcttactcaactttaatattttctttggtcctaaattttgctcagtttgtgagtcagactcacttctgctttgtttttaagctgtgcgctcgtcctttctttccagggccctccctcccctccctgtctgtgctggctacttttcttcccttcgttttctaggcctgcataggtcctctctcttgcctcctctttccttcacctccactctctcttgcttctcttgtgcttgctttgcctcagcagctgcagtctgtagtggttccacctttctctcccaaatcatctctaccccttggcctaccacttccccgtctcagtcctcagctgcaacttggcagaggtttggggcccacacacctgtgctgctgatactggcctccaaagccgttgacacctgctgtgtcctttttgtctgcctttctcatactgccacccagctcaggtgataaaacaggattggggcagctggagagactgaatcacctgattcccaccctcttcacagtgtccaagaaaatgccagcttctctgccttgaatgttatcctgagggcacaagactagcttatagaggacacttgaggtcaccttggcccttccagtgacttaaatggtggcacagtcttgctcaccatctctctccagcagggtgatgctctccagttcttctcctcctgttccaccctcctcagaaggttgctttctgaatgcagagaacaggagacagaggatgcaggttcttcctttctctctctggtaattcagggaatcagatgactgtgatatgggggctcctgggggaacactgccgccggcttatgccttctgccccagagggcagacggttgctgggatgtttgtgaggagttggaggcatgagaatcctttccctcctgcagcttgctgcgtccatcagtatttacgaagttgctgcctactatggtcaagacatttctgcttcatttgggcagggaagtaaaggacacagccctactctaccatcttttcctctacttttaaggaggttcgaactgtaaaggtgccagggtcatggctgggaacatcagtgttcttaggaaactggaatgttgtggcaccatgggagcagacacaactggaaaagaaacagcagccaagtgataggaaattttcctccagaagtcatcctgtgaccgatatattcacttcagaaatattcgcctcaggatggaacatactcatgccacacaggcagaacacttctgctacctaattcattcatttattcatctcacaaatagttattgattgcctctgctgtgcccggcactcttctgtgtcctgggggtgcagaaatgaacaaagcagaaaaaactcccctgctcttgtggaacttaaattctagcacagagaaaaaaaaagtatcaaacactcatcacaaacaggctgagatttctttcataacgttttattcctatagattgcaacatcccccaaggaggccctcgctcctggttcacttctggatgccttgacatatggaagctccttaactatcttccacgagatgttatcctgacaaaacaaataagaaagcaaacaaacacactgaactggaggtcaggagatcttaacttttagctagttctgctgttcgactgtgggtaatttaactcagttctcctagcatacaatactgtgtgttgacaagaaaatgtttaacagccttcctaactttaaagtactatgattctcatctgaggcatcattctccttgctttgaattgtttcttccatactaacacttgaattttttcttgagtagacagtttccttattgagccgtgtctgtgctgcttaccagcattttggtagtgccttctgtgtgcctagcacacaaccataatagctaatatttatcacgggattaccctgtagcaggcactgtgtgaagtcctttacaggaattcttttaattcattctcacaatacctgtcaggtaggtcttctttctatctccatgtcacacataagggcttagacaatttaagtaatttttcaaggtcgatcacagaaccagtaagagatagagtcaaggctcaaactcagttctggctgactccagagcctaggatcttatatccactataccaccaaaaagtgtgtgtttagtaaatatttattggatggatggatggatggatgaattcagggttgacacttagccagtgttcactggtgtggccgtagcattggtttatggctggaatctattctaattgctgttctgtctgttctatctgttgttgaatggcttgcatatcacccttcgaaggatggatgggtccccacgtagacagctataaaatatagaactgcagcacattcccggaaacctttccatttcatcagtagttagactatggattcagattatggtaatgattttgcctgaatgcctactctatggcagtctaactttatatacctctccttggtagtctgcatgagacctattgtgacaccattggttctgacatctgtattgaatcctctggaagtggaggttcccaggctcttgctgtttgccctcagctgggactttccaaatgaggctgagcttctgtcctcccgctcccgtttcagggttctgctgcttgtcatcctgtttgagaggagcatatagcccctacgatgactgaagctgtgccacacacttaaagatgcatcccagctgagtttccaaacctaaaagaaaataaatattctaaccagggaattgggttattgctgttttaatctgggattccagacaattcccagtggaatgctcatggaaagtacggggaagaatctcaaagccaagacaacagcgggacatttatggtattgctaagtccaaggcacttgtagctgcttattttaaagagatactcatcagattggtatgcctcaaagtgggttcttttcaccattttccattgattaccagataaatcctctcccttaattcttcctttctcttctttcattcttaaatcaacttatattcttgtggatgggggtaaagaggagcagagatcatattatttaaggttctcatacagagagtttctcaccattttattctgcaaacacagagctatacccaaactgaagacacagcatgacaaattagcaagttattgagaagtagagagtgatgccttttccttttatttgccagtgataaaagcaaagtgataaatggagtaaagtgttaagtgctgattagagaggacttgaaaaggactggcaaagaagcctgggcagagtgcaagaggagagcccagggaagaaaggccagaccgtgccatcctgctctgactcactgcccagattaccaggacagtgcccttcaacagtcctacagcagaacccctctgcttaccgggagagcaaacacaagtatgtttgttgagaggatagaaagggcatcattttttcttcttcttcctcttcttccataaagggtactgaattttttttgaagcttgagggtagaagagccgaagtacaattacagtagacaggtgggaaaaaaaaagttgcattctttaaaggaacataagcttttcattgtagcttgaaaacacttgaaagaccaaggacccccaagggtgcccaggcaaggtcactcttgactctacgcagagaagggctgttgctgggagcaaaggatacctttgcccagttctcaccaggggacttgtagtctcgcaagggagggatgttttctgatttgtctacccaaaggccgccctttttctaaactcatgggggagtggctgctgaagggggcagttacagcacctcacgaggtgctgccagcctgctcattggcagaggcttaccttatgaaacactgggcctcagacagtgatgctcaggccccgccttaggataacaatataagtatagttcagattgatggggcagaatttaaataattaaatgtcgttattttaaatttcttttaaacatgatcatttcacatttagttgacattgcgccatttgcccgcagactgtgcattttgcagtgtccatttggccttctaaaatccctgtgaattatatttaaaaatcggaacgtaggactcattcatcatatttaatagggttagggtttatgatgttgcaggttaataaatagccataatagccgctcggcgttttctggagtcagaacaccagaaatagtcccttggctctctttcctttccttgtgaatctttcaaaattcttacattactactcctgcttgtgtgtgtttaataatttaatttaatgccttcctttggaaacattacctcgctgctcacccactcggctgttttgccttctcagcagagtaactgagtttaagacagccacgtgacaggcacagctatattagaaccagcatagtgagaagggatgcagtgcctctcttttctaattgggtagagcaacaattttatatgctttcacattatgtttgttcccaaaaaaaaagaggcaaaattgggagctgaacgtgatcatcattattattttatatttttatacataacaagatgcgctcatacttattgtctcacttaattgtacagcagtccttgaagcaggtgctattgattctgtttgatgagctgaccgtgtctccgataggtcaactggattgtccaggttcacacagcatgtgaaaggccgaatgtgatttctacttcttgaaaccacctttcagcttttttaggagaaaacataatgacataaagagtttcatggacttgaaagtagaggcactgctgaccgctgaagtctgggcagccacaggtgcagggactgggaccggtgtggttctagtgatgccacctgatcatgaagttgtgctgaatcctcagcagactggcttctccctcgtagtaggatgagggagaggaatcaggataacagcctgtccctgtggatggtttattctggttttgttcaccagtcctgctgcctccccgtttgttctcttgcgagctcaggttagagttgaatttctccctacaaccagaatgccagggctggtcctgtaggccctgatgggccagctctgagagtgggctcaatccagtacccaattccccagcattttgctaggggtgcccttctaggagcagggtctcactgcttttggaagtctccaaataaaaaaccatggtaatagaaagggcttgggtctggatagacgtgaatggacttgaatttcagggttggctctattagagagatgatttaacctctctaagactcaagtttctaacgacacctactaatgagggcttcttagaagtatcagagctcatttatgtatagcacctggcatagtgcctggcctgcagtggccaggtagctcaccaaagctccatttctgtttccggttatggtgaatagcctgttgaggaggtggcttccccatgcaggagccaagggaagcagacatgtcgttgtctgtgtgtttcattaaagaaaggacctagggttctgtctgtgtattattgagactaatcttcctaagtcacaatggaaataagctttgctttcaaacgatcccctgtgatttccaggggctcagttttgctctagggcactccatcccaggaccttttcctacccacatgtctctccctcagtctggaactttcttcccgttctcgcctgaatctgtgaatctccttcagccttccccactcttctaatacctatcaagtcctcccctgtcctttgctatcacatcagtgttccaaaaatggcctctcctcacagctgcctgtgacgtgcagtgatatcaccagcagagttgagacaaggacaaggagaagagatttaattctctgtcagtgtcttacaaagcagtaatgacttctaacaaagccgaccagccactagcattttctactttgttcccccttaagccttcttttgggtgccttcactttttacatccaaatgcttgaagctttctactttccccgcggcacatgtggctgtacgagggccctggttagctgcttcaaacagcttgaagagcaaaaacagcccacagcagaacagccaggatgctttggaagggaaatttcctttttgggtttgctgtctgaaagaatttccgatgcaggcagacgttaattcctagctccatgcttcctgataaggaagcagcttcaataaatgcagctatttatagatgtctttttttttttaagaaaaaaaatatataaccagaggtttactgaccttttctttcacttcacatttcatgcagtgagctctgtgtacatttaaggcagttcctccagcgtcagctctgacaaagtggccctggtttcgctgtgggggatggggaggggaggatgaagatggcacggcccctcattagtgtcacgggctctccctttcctcagagttctgaagtagacatttggaaactgttgacaatgggttgtccctacctggtgctctgtgttatttatgtgagcccagaggtgcccagctttattctagactcaacactgaaaggttatagcagactaagagaaccctttaaaaaataaaagacgatgagaaccagtccattttatgaaacttgaacagcaacaggaaatcagaaactttatttccatttcttcttttcttctgtccgttgcttcctcttggattttcccaaccctcaatacgtctgtggtctttctctcgtcttgatgggtttccgcagattgaggagttcctgtccatgagctccacagtcacccttacatgtatctacctaatgctttctggcaggtgtgataaaggttcagtgtgttggcttgaatgtgcttctctaagttacttctcacctcctctgattatcagaaagcattggttgagctgagtatatacaaatacagcagtttccatgctcaaataactgatattttctcccattttgcttcatgtgtgagttacaccacattagtaattcaaacttttggggtttctggcaggatgaccttgacaacttcatcagaggtaaacgttagcagcgacgtttagatgttgctgcttttgctgttgccatgggtggattctgattctcagttgcctgtaccatgtgtgagtgttttgtggttcatttttctgatctcttctgaaggaggggtagagcaggacttgagagatttaaactggccctggctctggccacatgctgactgtaaattcccaagtataattagtcacactgccccaatatttactgcctccatcttgggtgtgtggacaaaaccccattctttcaacattggtctccatttctgcttccagcagatcatggataccagtagctctcaaatggggctgtaagattccagtaatagaaatgcagatgatgggtacggataatggataaagaactgtagatgtggggtggatgacgattggatacctagaagggaaagttgactgcacagggctacgcagtgaataccctattttaccaggtcagctgaggctaaattctctacttctggggtgggggtactaactgaaatggttcactgaggagggtgaaggtttgtaagggaagatgtaacaatacttttttaaaagcacctaggacaagttttagggtgttgaatagcaccatttaaaaattataggggtatccagcaatttatggagctctgattgagaagtatcattgttaggattttattacccatttgttttccagaagtagctcatctttgcaaatgagctttagttttttggtcattgtaccctacctgccagctcacaggagcctgtgtttctccttaggagccactctgaggtcaaccgtgtttaagatcataaagccactctagagaatctctgtggcattgttgtgtggaagaagaaataatgatcactactattattatatatatgtgtgtgtgtgtgtgtgtgtgtgtgtgtgtatataaaagtatatgtgtgtgtgtgtatatatgtatatatgtgtgtatatgtatatgcttcatatatattatcctgaataataacaaactctgcacagtagatattatacctgaggctcaggtaaaccacttgcccgaggtcacccagagaaagtggaggagccccaatttgaatccgtatctaattccaaaacccagacttttattttccacttcaccctattactctttaaaagtctgaggagcaaatgaaagttgtttcattctatctattggttagaaggagaatatccaagctaacaggctgatttttttttccaatttttaagcataatataaattactgacaagagggcccagatggataaaatcagagctataaaccaaattatcttttgaacttgaaggaagataaatttccatatccaatcctgtatgcacactgttatctgccagatagtctcaggtatgtgtgtaaattctggagtgttagaaacaaaactaaatgaagtaaaaagaggttccttgtctattattttccatcttttttaaagagatgatctacctcacagatggttattaaacagtaagaaagatgctgtgattgaatgaagattgtgttactgagtttacaccttaaaacactgaacttcctgataatttgtgttaagccaacacgcttcagaaaaattgcctgacgtttggtgccttagtttacccacatggcatgtgtgccagaacacgctacaacagggtaagagggcagagaacatgctcttgtaggggtcagttccttgagctctggttctacgtggctgattacttgggtcatcccagcagttcattccatctctcaggactgtggtttccacatctgcaaagtgaaatggcctgagtatatgattcctaagttctccccaactcaatcgtcgcattgttctcttattccagaagagaaacacaaggggtatcagcagtggaacattatctgtaaatgccagatttcatgatcattcacttgatttttaggactcaacatcaaattttagtgcagatggtggtactttcatgacacaggaaattgtccttcgttttacctgtgattgttttgggaggaagccctcctgcaaggaaatagggaaatccaacacccagctctgttgagcatttccctatggttcctgtgattgaaatcgggttaatgcttttgtgggatgagaactggtgccagctcctaggccttgcagggcttctaaagactgtccctgccactcttgccttatgctggttcccaggaccttacagccagatcacaggcctgctcccctgttctcatagccccctttctggcctgagaattgtctgtggcttggccctttgccccatgcaacatgcacaggtgtggcttctgctaactatctacttgaccccaactgtgtgattagcggcaatcccctctgcaactcaaggcgtgtttgcctttcctgtaacctgtaaaaaatttcagtctgcgtttttctccctctggagatggtatccactgggttttaggctttacagagccagctgatctgcgtggatgggccacactatcctcccttagccggctccgtagcacatgcacaattaatactgcattaattaattatgggagaaaaaaagcacagttggcaagggaatgaaggctttcagcttctaaagtgaaggctttgatgctgagcttgaaagtacatttccatccgcctcagccagcagagagaatctgtgacacttataccatcccctgggcatgaaaactcacacccaaggaaagtatttctaaatagaggccctcaactagttgctggaatcatctactcattgccatgggctgtgaaaagggggtgtaagattagggagaaaagactcgcccaaagcagcagtgattcgtgaccaaagctgatgaggggttttattttttctccttaagtagctcttaagtcaccaacatcaggaactctttgtagagaaacaaatatgagtaagtgatttggtgccagccctcttgaggacataaaatgactctttctccttcctcctcctcctcgcatgccttgcttcaggaaggaaccctaaggtggtgcaggttcccaaacctgttattcggatgggttggaaggttcatctctgttaggcatggtttcccactagatatgaacaaagtcggggagaaaatgctttcctttttcattctgattccttcacgccattgttcttgaactcctcagctcccacactgactcctttcacttctcctatgaggtggtagtgaagccacctcacaaagtcccctctctgaacagacgcagttctcgttcccctatttacaactctgtcaagcatttttcgtgggggctcttgctgaccttaaaatttggccgtgattcaaatattcatccaggtatctggggttttattaaaggtcttttaggaacacaaaagtaggaattccctgagagaggttttcttcacttgagactcatgggttataaatgaaactactggaatgccctgaccaagtgctgagaggagcttcagagacccacaaaaacctaaaaagatgtgaaatttgtctctgatcaaatagattttggaccttatgaaagaaaataagcttttcttttgattcttagagaaaaatttttgcttcagatgaatccaagtgtgtgtgcacgcacgtgctttcgttgggatcgtcttatagctgttattccagatacctgcttcacaaagcttctgtgattattcctactactgtgacgattcctgccaccccagtgatcggggaaaagaacttgaaatacaactgggtattgtagcattggcactgtgcagacgctgtgtagctctctcatgtctggtacttctttgtttgctaaaggagtattgagattcagaaagtggctgccttctaaacctttattgttcagatagcattactttggacccaggacagagggcttatagttgactgtgaacggggtgaatgttatacttaagcagggaatgtggtcacccagttgcaatgatttagagtgctttgaacataaatatctcccacgatgaatgaccagggtgcctgaaattccattgttgagacattccttttggatcaggcattatttccacatagctccacttttaaaagtaaatcattatggcaggagatagttatggagagagataattaatacctcaagtccctaatatcttaatgaaaattagcttatcagatctcctgaattttttgaagtggaaggaccgtggccagcacggagtgggtagagttggaaataagcactataatttgcttagggctggccttctctgtggataagacagatggaaaactagatggaaaatccaggcctcctgatttagacaaaacattgtgagcctggagctctgaggccaggatgagcagtctgctacttactgtgcgtggccattgctctcaagacattgccatcatcagtcttggccaaagaaggtcaggtctcctctagtacactggcgatttgagaatgtgcaagtcatctgcatttctttgacaggagtagtgaatttgggagtataaatctgaatccttaagcctttcaaccattctcactaaatgtctttacttcagggatgatcacgtttgatcgtaatgccaagatcttgcagatgtataaagggcatggtaatccaagtcttgagttgaagtaagtggtcaggaaaatcttgacccttggggaaggagctaccagagctgggtggcctatgtgtgtgtgacagggaggaggtgtgcagaatttgggggaaagatcctttgtagttctccatgtggaataataacttccatttattgagtgcttatggtaggcgcttttcacatgtattgtatcatttaaccctctaggcagtcctgtgaactgggttttattatcctcatcttactgatgaagagtcaaacttaaagaggaaaaggaacttgaccagagtcacagaggtggtaggtgggagacaggtccatccaatatacaccttgccttccaatagaagccaaagccctattgcctaatctcttcactttaagaacatgaagaatagtgttgagttcccctttgagatctgactgtggttaaagcttcacaaatttcagaaaaacagaataactcactaaaataaaaatttaaagctaccccacagaaaacatctaccacaacccaaaacttcagggtttatatatccagattttagtgaactatatgactctccctagtcccttgctctgtctcctggtaaatactgtccctttcagagccctggcacatacatagtgtaataagatcagaccccatccccctaccattccaatgcaatctaattgcaaagtgaaaatccagggccgtcttagatcctcatctgtctacgtctctcttggtccccactgcttgatacgcagtctcaggttcaataccattctctctttttgtgctttaggtctctgtattgtttccttttcaccacttttttttttttaatgaagtgattttaaatggaaaattaaaaacttaactgtgaatctggcagtttcctgctaatgcctctttgctaagaagcttcataaaatactgtatcttattcacttcagcacagctgctgtgggctctcaccacttaaccattcacaatatgtctgagagattaatttttgtaaggctgtggtttgagatatctcccccttccttgttttacttaaaatcctcagtgggaaagcgtgcatggggaaaaaaaaaaccaccaccaccctggataaaaggtactttggtaacatacgtgctttaggaactataatttgtcattttattttcttgtgccctcttcatttgaaatgctgcagcctttctgccagaagtctcaagtttgtgtatgagactgagggggaaacgagagtaggtaccttgtgctgagactgtcctgggacagtcccgtggtgggtgtgagcgtctgtgtgatgcaggtatgcttatttcttcatgaaagccgcaggtactggttgcctctcgcagggttaaaactcttggcggctcacaggaggtgatgaagagcaagggcacgggagaatgaagaagcaggaggaaggtgtgggccagggtcggtttcggtggggtccccacttgctgggtgaaagctgaactgtttatccacacatcccagcagcagcagaaagccaaggggtgttttcaggactcagctgccaaagtttcttgaagcagctctgctcaaaggcatatgctgggctcacttctgagggaaatttcctttttggggaagttgaagcaaaggaatttcctgtgtgggcagacagagcttcctgacttgaaggcttcttggaagggaaacagtttcataatgaaatgacaaattaaagacataccagccgggttcacttcaaaacagctattgagagtgcaggcaaagccctattatactccctcacagaacaaaaataaatcccatcctgacaggtttctgtatgccggattatatccgtccccccacacctttcttcacagccttcttcatgcttcccttcctcccacccccgccattagctgccaccagctccatcttgaacagctctcgagagcagccggcagccaggccgggagcctgtttcttgctcccttgctttgtggctttgcccatccctgacctgcgtggaggccttataggttatgtgacagccctatgctgccaagacacagaaatgacctctttccttccccttttgacataaagcaatgattgaagacgtcttcagcaatggggtgggggcgggcagtcaggggagaatgcagccatttcctcaggccggcctttaaaatcttgaaggcagtaaatgtaagtgctattccggtcttgggagctgggtctgaattctttgctttgttgaaggaaatagggctctgtgctgggtggacgatattcttgtacctgaacatgtcattttcttcagttccatcagcctgcatgtggtgctttgttttgtttctgaaattgacatgatgatgccttaggaactaaatttttttctttaatggaacaggctaggagaaagaaggatggcggtatcatttggggcgtgagaacagtcattattaattaggcttaagttaatgaaataaaaaaggcacaggctttgaaatcagttgtctaaatttaagggccagctctaacaatatacaaccagcaatgtaaccttgaacaagtcactgaacctcccagcctcagtttccttatctctaaaatgggtacagtcatacctttttcacattgttgtgaggaaattagattatgatttcagaggcactttgtgaattcctataagccttcatacttcttattaaaccactattgggatctctggagactgaaatatagtattaggctaagacagcagaattgtagaatttgtagatcaatttggcaaatatttagtagaagtcttctatgtgtgcagcatggctcgactctgtgggggaaaataaacaagtggaaagtttcaggtggccgcatggtatagcagaaagaatattggacttggggccaggaggccagggttcaatcctggctgtcactcagttgcctgtgacttggtatgaactgtttaaccttgatgagcctcagttgctcatctgtaaaactgggagaaatcaaactctatgaccttaataaactctgtccaactctaacattgtataatcagttttaagaggtttttgcctttagcagctgtttataggatttattctaaagagtagggaagaaatattcattgtataagagcttgtctgatgaagaagattgcatgaaaaagctacacttttttaataagtatatctgatgtaaacaggaaaaatgggtgcttgccagatatgtcatctatagcaacttgttttgagggggtctctgaatgctgacatgaaaatgactaggatcatgggttgaacgtgagtttgctcaagagaaggttctcttggggctttggtttacttcctcccagctgctccagggaacactcaggatatttccaaatggctgctcatttaagccattcccgttatggttctccttgtccaaattggcttccatggtacagtcccagtgttgactggttctgctaatttgattctttttttttttaatgtgctgatatgtagttttaggactgctgcattattgttcctctatctttccgtttgtattagtaaagaactattagcaattttgcctcagtcttctaagcacgctttttgattggagaaaaccaaggtaccagaaaacttagataccatgtggaaagtcacagtttactgggtgtgtactatgtgttactagtgctttaataaatttcctcattaattttattctcccagcaagcctggcaggtagctgatagtatctttgctttacacatacagaaactagggcttagagatggtaagtaattgggtcaaggccacagaactggctggtagcagagccagaatttgaactcatgtctgcctgctccaaagcctgtgttctttatcccctcagtgcacccctactgttttgactgctgttaaattgaccttatgcttagaaccgaagtcaaacccgtaccagggctgcaaaaagaaacaaaattaacctcatagtctgcatactctcgaaatggcaaaaaagcctgcaactttccgttgtggaaaataatatacctgggtgataaactgagcaaacatcacccttgcccttgcctctgaaagagagcctgttctagttcatcctggggccagcttggcctggaaccccactggccagctctgtccacaccttgcatattaggacagaaatctgcctaccacattccagctacataaagaaggtggccagcacctgactgcctctttctccttgtgaaattccttggaaataccatttgtgactgcttgggcttgttctgaagaaaattcaaatcttgttctgtttaacaaggattgattgaagaacccgtaggctcagtgctagtacaaagataagcaaggaaggaactcagaataagagagaaaaaacttggataataattatcaaaaccagtatttattgagcacctactgtgcccagtagagtagtaattacaggaggtaaatatctaaaacttacatagctcttcacagaacatacatctgttcttgcttctgtgtttgattttattagctttcctctgtacacataagcttttagtgtatgtcctattattgaagtccagagttttattatttttcacttatttgggcatagatagttccagaatttacttgtcttcctcattctcattgttaatctcatttttcttccctggagaatatggactttcaaaactatttttcaatcaaggccaaaatatttcttaaaattcacttctatttaaaacacagataacatccaggagaaaatctgagaagaaaaaaaaaaacgattttgatggtacctgattataaaagactcacagtactaagttattctttggcacgtgtagcaaaatactatgtaggtgtcatttcgagttcatagtaaggggagaaatggtgtcatttttcctgcagagaaatttaatctttcactttaatctttcattggcctatagcagccagtggggtcttttaaaaaattcttttccttcatattccccgtttgagcttaaggtacaaaaaaagaaaatactcttgaaatgctgtgaccagatctagactgtaacatgccccttcactcctctggtgaggaagtgcgggaaggtggaagacattgaggggttgattatttacttcgtttggaagtaagaagggaggtagctcttatttggaataagagctgtcttcagaacaggtgtgtgctctcctgaagcccagagctgtgactccctgggtgtgtctcttacctgtgcccttgggcaggtggcacgggagaagaatacgataagaggaggatggtacagacagaggagtcacaggctgaacaggctgtcaccggggcaagatgactgacaggtggatggaattcaccatcctttcctttcaatcaaaaaaaaggtagaaagttgctcataagtaagtttgagttatatcatcttcttcatagccgttgctcttcagacacaggtgctggtaatcaggaaaatgcaaggaaacagctctggggaaaaggaacaagcctcgttggccttgagagccccagtagaccatcaggccttgctttggatattgggaggtgacagtgccttctcacgtgcctgacagtttccctgcaccaccaagactctgtgtgactgaggccgtggcccgggtttcaggatgggcattcagaggaaggaagttccccctccttcacttacctcacgcttactagatgctgggttgcctatgcccatgttaaaggaagccagataactttctgtccccatgtgatccaggcccatcctgaagcctgggggttctgaacataagtatggcggttgcagccttccttctgtgacttctggaattcctgacagagagggtcatatctagccactgtcaaccggatgctagacttgttttgttaggcccttcctccttcccttcctctacttatcttccaataaccttaggatttggaggaaattaaaataaaccttcttctagaaaggtgtcagggacccatgcacaaatgtagcctttttgatgcttgagaaagaatgcctttttgacttccgtgaataaagaataagtcacggctaatgagtaagtaacagcacgtgcctgtggtcccagttattcaggagactgaggcaggaggattgcttgatcccatgagttcaaggctgcagtgagccatgattgtgccactgcactccagcctgaacaacagagcaagaccccatctcttaaaaaaaaaaaggaaaaatgcctatgcaatggctctgaggcaccctcatggttgatccaatggccttgcctagtgattttgacatgctttaacttgtgaccaacatctagtctatttgtctcccattagagactggttgtgacagcattgccattgacctgccatatataggaactccagtgtctgaaaacatagcaggactttgtaggtattaacattgagcagtgctttcacattttacagcttaccgtgatgagcaagatattgtgtcaaaaatagtgcattgcagatatcaataagaggtagggtaggcagtgatttcagtggtgtcccactccacactgtaattttgtttctttggtcaactaatgtaagaactgagtctgtaactctaacctagggagccattgctgtgtgtcaactttgttgctttaaaatcttgagacaccttttcagtatctcccactttgtctgagtagtcatacttttaatgatatttaaaagtcaaactctaaatactttggagctaaatctcagcagagataaacttcaaactggtgggagtgggggtagagaaacccttctgggagtcagaatgagatacttgtgtgtctggactggtggcaggtttgtatgttaccagagtgatctccatggtaacggatcaacatggcgccaatgacaactctacactaagagcttcaggttcccatgagaaagtggatcctcacagcaaataggaagaaatcaagaaatatggatccacactccccttccctgtagaattctggccgtgaagtttcagttcatataaccaacaccatgtcctatttaaccacttgggtccctctgagtaaaccaagactcttctgagaatgcagtgttctctcagatttcaactaaattcatacaaagtttaatcagacttgcatagcaaagaactatattgcagtggagcaagaatgtaacttggagtcaggaagcctggcctccagacccagctctgacactgtgatatgaggaaatcacctcgcaggttcttattttccagattctcaaattcccaccagtgctgatggtcaatcatccaattatattgaaagcccttagtatgatacatcagcagtaggaaaggtagatgactaaatataatacagtgtgccttttcctacaccatcaaaggtatgataatgttgtgatcatgtgtataaaaactttcagacacctaaaaagtagaaggtgtgattcatctctgttaaagcttaatctctgagcataacaaccaacatctggaagctaggcagccaacagaggggttaatttttctggaaccttggttgcaaaaggttattagtttgcagaaagactcagagatcactgtttatcttaaaccacaagagaatgtttttgaattcagaagaacagtgatatagttcggtaatttcatgaacctcttccctgggaaaccttatgactcaacagtcaaaggtgtccgaatagtaaagatggttttcagtgatcaggtctgtgcccatgcctggccttggatagactctgaaatgagattctttgtttgattgatggggtgatggtttctgttgtgtacatttgaaggaaaccagtttccccacccaaaatttctaaggagtttaatctttggggtataggggagttaaactacactgagtcaaggaagtaattgattgcatatttcctctaaaagtcagctatggacttgatattgactaaaacaaactagcagttctcttccaccaccaagtcagagcgtctgttcaccattctgcatgattaaaagaacaactaagaatggtaatgctccatttaaactttccttgtgattctctctggtctaccttcaatcaacaaaagcctaaaatttttattttagaatcatgatgttggaagatctttagattgctcataccataaagctgtttctaagattggtctcgggaaggtccaagatcaggattgaagtatgaaaaatcttggccaggtgcagtggctcatgcctgtaatcccagcactttgggaggccgaggcaggtgggtcacaaggtcaggagatccagaccatcctggctaacatggtgaaagcccgtctctactaaaaatacaaaaaattagctgggtgtggtggcggacacctgtagtcccagctactcgggaggctgaggcaggagaatggcgtgaacccgggaggcagagcttgccgtgagccgagattgcaccactacattccagcttagtgacagagtgagactccatctcaaaaaaaaaaaaaaaaaaaatgaaatcttgatcttattgccttgtcacctttttgtcttaagtttactttgttggtataaagaattttttttaattcagcaagagctcaaagagccatatatatatatataaatttttttttaattaaaaatctttctgctcaagtctcaactacagtgagactgaatggaaaatgcaaaagctcttgacatgatgtcggaatgaacaagatggagaggttgaatttgagaacatggtttccttattgtgaaattccagtttcagaacattggcactgtctggttcaaatataaatacacattattttattgtaatccgctagtttaaattgtttattctgcttataaggaagagatccatgatagctgtgaacccctttgaaggagactttatccatggctcagtccaaggtgtttgaagcacttttctcatggcctggctggaaagactttcagaaataagcagggttctggtaggaaaatgaaggcagttgaggaaaacagtgcacatatttgtaagaggactatacttggtatcttggaaaacataaacagaccctagactgtctaccccaagtctgggaaggcggtcctctgaagctgaggttctcctggaactcccttccacagggctgcgttgcaaatgccattgtggaggcatcacccgatgtggtggacctgaacattggggaaatgcagtgctgcctgctgctgcgctggctggcatctgccctcctccgtctcctgggtgctgccacagagaagagagagagagtgaagcgggcagagactggctgttgccatcacacaactgagggcggacctggagctcagccggctgagggtttgagagaccgttgggagcaagacccaaccacaaggcccatggaagaggaagttggcagatctcagaaaggggaggaaaaggagaggtgcttatttgttcatcttgtttttgcttttaaggaaaggaggagagttaaatgagaaaggagggcgagttgagaaggttctgagcagtttcaggtccacggttgagcaatgttcttcctggtcaacaaactgcctggatttcattttggcctgacaacagccccaccacctagggaactgcacagagatcctgtgtgttaaccacgcaagagagtctgcagttagaatactggggcttgtgcagagagaagaattc

SEQ ID NO: 17 - DNA, 178877 bp, Homo sapiens
gaattctggcggagggcatgagcctgggactccatgtcacgtttccttctgatttggaatctctccatctgtaattcctcaccctcacccttccaccgttgttagtatcatggtgtttttgtttttgtttttgttttaagaacctgcagtttgactcttcatcgttcatctaggggaagacatctgatgttgttttcctatggaaatatatatctattatatatatattttttgcaaatctcacaaagtgcggcaagcccagctggtcaggaaagagaatacttgcagaggggttcaggttcctctttttcctgccacgtggatcaggtctgttcctgttactsktgggtcttggctgaaaaaaaaaaatgcttttwaaaaagataaaatgaaaaggagagctctctttttctctctcttgctctgtwcttcccttggtyccctctgtcctcccgccctgcctgcagttgagattcagatgccttctgacagagttcagcctcttggagagtcttggggattgttggcacctaaacagaatcagtgacccgggtgctttgtggccagcagcacagaatcaaacccgcatcccagcattgggccacccatctgagggaggccaaaatcatcacagatgctgctgtgctgcagacagatacatgctagtccagagagccgcccctgagatggctgtgagaaccatgtgtctaaggcgtaagataaggatggaaggctgtccaagttatttggaaggcctcggcagcttgggattagcttgggagcgcagcgctgcaaagtggaaaatatgaaaagaccacacaggcccagcagtccagaaactgggcaaaaatattctgcagtggggatttatttttccaaagcaggtaacagaggctagtgagaaagaaaagctcctctctgctccattccaaaggccatcttgtggtcagtttcatgccctcacctgatttttttttttttttttttttttcaattcctaaccttttttaaagtttcctggtctccactggacacagagctttggagacggaggatcccagagggcagtctcagttgcaatcagtgtgtgcccagcctgggcagacaggaaattcctcggatacattattttttctttctttcatagctgtgtctcagaaaggacccatttgtggctctttttcacctcaaaataagatcgatggtatcttgtaaaatgagggtagtgccacttcttagtatttttgaaagctgttttagattttttttttttttccttttctagccatctaaattgactcttccaatataggtctcagaaatccaatatttggagtacaatttcttttaatccagattacacctgccttacaaagcaccccctccttgttcccctctgtttcctctactcagttgggggagaaactcacagctcctccgggatacatatgtgccctcagcagcagctcccaggtgaagttaccagacccctgggcttctccccagctttttctgagttgagtcagacatgtagagtttgggtcacacaggcaagaggaattttccctcggccttactgacaaggacaccaacctagggtgcaaacagatggactatggttcaaggacactggaattgaggagctgatcaaggctctcttcagccttgctctgtccctgcctcttatcagagcacaggtagacacacgggcatagccagcccactcctactgtcacaggcgccccaccattcaaccttccgggaggtcagggaccttctatatgaggcgagtgggtctcagtctgcttgaatggtgatgagattctgctggatctcagcacgctgcaggtgtcttttgagagcattcagtaggacatggtgatccctatttcagcctctaagatgactggtattctatctgaaatgcagagattaagccaaatacctgatgtattgtgaaagccactgattttaagaatggagagaaagggattttttactgcatccctctgtatgaatatgaaatcagagaccagggcatgatgttgctaggattagagcctctcagtctggcctcttcacccaagtgcaagaactcagtctcttactgttcaaagaatcttaacagttgaattatggagggaaattcccttttgccccaagcatttctatatttaaagcaatatcccaggagaatatgttagacttaggatgataccttcagccacttgaagaagaaatagaaggcgctcattccaatatagtctttatttcccattcagatacaggttgagcatccctaatctgaacagttaaaacccccaaatgccccaaaatccaaaccttcctgaacgctatgacaccatgagtggaaaattccacacctaacaaacacatttgctttcttatggttcaatgtacacaaactgttttatatagaaaatgatttcaaatatcataaaattaccttcaggctatgtgtataaagtatatatgagccataaatgaattttgtgtttagactttgtgtccatccccaagatctctcattttatatatatatatatatatatatatatatatatatatatatatatatacacacacacacacatacacaaatattccaggatacaaaaaaaaacatttaaaaatccgagacccagaacacttctggtcccaagcatttcagataagggatatcaatctgtactaccaataaggatttcgtaattcccctaactgcaaatgtcctcttcatttgttctttatgagaaaacccgggtagtgccagcacctggatacagtatttacaccctgcagaccctaaagatttcagattcagttagcaaaccttgatgaagcacctgctggacactgagggacccaaagctcaatcagccataatccctgctttcagagtttatattgtacctgcctaatccacccggcgtgactcatttcaacactaagtactaggggtgttgtcaggagacaaatctgaagtcaggagaggaaaatgcaaaggagccctgccgtgtgatggatgtgcattctcacttgggtcttgaagttctcattcctacatctcaagctagccaggcagtctcctctctatcagaagaaagcactggtaattggctagactggctatgttgaaggtaacatgaactctaagatcttgacccagggcgacttggttttgcttaaggtggcatcaccaatgttccaaatcctttagggagatgagggtatccccacagaaaaagaggaataatagaccaatggattttctcctttcaccagtatgtttggaaccctctgatccaatgtcttttgatactgatctcttgtccaaatgagaatgtcgctttagctgaaattcaaatggctgtgacaatttaccgaaatgatgaagtaaccaccattcccacctttcactgcctaggctccaagtctgaatacatttttgaaataggaactcccttttgcaaaaaagaaacctgggtgtcagggaggtgaagtgacttgccctaggagcagacagcatgccaagaatggaattaggctcaggatccagcctgggctcaccctgtgtggctcattcccacccaggaaactgaagataaaagatttgggaaaacacaccaagaaaaaggggcagttttctttgcccaagcatttggtgctagttagaggctgttcactctctcctgctcctcttcggagtagaaataaaggctgtgacacaaggaagccagtggggtgggagggaggcaccataatccctccctaaaacccacagaagactaacctgatactcttttgacccaactgcatcaacactaaacagctgcagaccccctgaatctttcacacatgccaagtgaacattcttgatgatttctctttgtgaccgcaaccacctgcaaaccagaacgactctagaatttccttccccgcccccctttttgtttagtttctaatctcttgtttatgaggtgtggggtttataagggactgaatcaaatgaatgtaacaaaaaagaaaaaaaaaacaaaaaaaaatgccttttctcagggccagtgagttgcaaataatttttaaagaaaagcctataattacatcatctcaataaattttttataaaaaaaaaaaaaccatgaagtccagagtctctgtttttaataatatgaaatggagtcagacaaggtgctccgatgaggtaaatcctgtctccactcaattatggtataaagggcaatcatggtttttctctggcagcaagtctccgctgcagggcagtctgcaggcgatctttagacaagtggtaccggaaaggtcagagtgaaccattccaagctgagcagctgccacaggtggaagaattaccaagaggaaccgtgatcagagatgcttgggtcccatgctgtggtgaaggtttattagctcactgagaacttagcaatgccaggtcctcacacaatagaattgccccttaaatctgctgagatcagaggtctaagcctaccaggtgatgaaggcgtaagggctgggatagatcctatgactaaatacaggactgtaatgacctagaaggtcatcacacagctcagagccagcccacatgctcagaatgtcccagccaacctgaccaacagagccacccaccaaccagtgggcacttgggagttcaagatcaaacattctgcacttgaccagaactatctgccatcagaagtgggtggaaacaaggggaagaatggaagaggaagcaaatgcattgctgttgagcaaattgggcggaggttcaaaatgtctaagaaatcagcagtctcagaaaatgttcttagtttacttttgtctttaggttaacccagttactctgtatcccctgagaatgattgctgaaatttggccctatattctgtatgatcagagcacagtatcaaataagggtctagatattttttttgtggtgctaaaaatgcattcgaagctactatttctataatgcagcattagagaacttgctagaaatgcaaattatcagttcccaccccataaactgaatcagaaactttggagctgggacccagcagtatgttttaacaagcactctgggtgattctgatgcacacaaaagtctgagagtcactgctaccaatttcttcatcttagtatgaaagagagcttgtagcaatttaaacaataaactcaaaataattgatgacaactaatttgcatcaatagtactcacacacaataacgctgcattttcctaatggtagatatactgtggaatgaggctaagtggacacagaatcacataccaaagtcatcgtcttgttttctccaaaccttttaagcaatcagtttgctgtaaagatgagctgttttaaagggtaactcttaacagctgacctgcccttgcaaattagagcacagcaatttatccacttatgcccacttatctgcctaaccagcctgatctaaaaagaaaaataaaaggattattctcatctgctaactgaccttggctgtctgtccccggaattattaaacagagcctggatgagcatttagccagggcatttgcagaggactctagaaccactggactagaccagtgcttctcaaacctgaaagtgcttatgaatcatcagatctcagggaaaaaagcagattttgcttcagtagtatcttgggaagtctggacagaagatctgttcttctaccctactctctgggtggggcttgaggtgctgcactttttttttttttttttttttttttttttttttgagacagagtctcactctatcgcgcaggctggagtgcagtggcacgatctcggctcactgcaagctccgcctcccgggttcaagcaattctctgcctcagcctcccaagaagctgggattacagatgcctgccactacgcctggctaattttttctatttttagtagagacggggtttcaccgtattagccaggatggtctcgatctcctggcctcgtgatctgcccgcctcagcctcccaaagtgttgagattacaggcgtgagccaccgcacctggctgaggttctgcacgtctaaaaagctccaggtagtgctgatggtgctggtccagggaccacactgagtagtgagaagacagtctcccttcagaccctgaaatgctaactgtgatgcaaaactgaccgaacccctccctttgttgttttcctctgctaattcctccctagaatggtccctgggcccagtcctgctctgtgagaagtttgcttgttccctttcagggcagcatcaagagtaaacaacatgatcaaaagcctcttcaccaagtgaaggaacagctattcatgtactggaccttcatacagacattcataaccagatgcctcatggtcatcattcttatgggaagcaatgagaattccaagcatcactgcctctcagcctctagaaagaccagtcttggtcactgaaagcagacagaacactaacaatgccattcttgatgttctaaatggcatagataggatggatgagcagatcttccatgcaaacagtccaagatgctgacattaaaatcagataatcctgtttgttagtacttaacagattcactgttttcttattttttttaattaaggccttcagtctctgccagattaagatgatagatttctgttagtaaaaaccactgaggaacgtctgcttaatctcttctgagacaatagaagactatttcctctctccaaaccctctcagcagtggccttctggagtcctctgagatgttcatgccttttccctcaaccagaattttggtcatgagatcccatatcagaccatccacctgagttgacctttgcttcctccagtgcctctgggagagctaagtgctatctcggtgccccagctgcaagcacttctataaaagcaactaaatgcctccatgcagtgaattgctcatgtgcctctgtcccctactaaagctctctaaaggtagagtattttatgcacatttttactaccagccccttgcatggggctggcacaaggtatatgttaataagtgttttaaatgggagtgaagtcagagaaactctttgtgaccttaatttaggcaaagatttcttgaatatgacaccaaaaaatccataaaagaaaaaaatggataaattggacttcatcaaaattaaaacttgctcctcaaaacacaccatattcagaaaatgaaaagataagttacagactgggagaaaatatttgcaagtcatttgataaagaacttgtatccaggataaacttccacaactcaataagatgaataacccgattttaaaatggtcaaaagatttaaacagacatttcaccaaagaatttatagaaatggttgttaagcacacaaaaagatgctcaacattattagtcactaaggaaaggtaaattaaaaccacagtgagataacaactcatccacaaaaggctataataaagactgtcaataccaagtgttggctaggaggtggaaaaactggaaccctcatacattgctggtggggatgtaaaatggcacagccactttggacaacagtttggcagcttcttaaaaagttaagcataaatttgtcatatccaaaaaatttcactctgaagtatcttctcaaagaaatgaaaacacgtccacacaaagacgtatacacaaatatttagagcagcattattttactttattttgagatggggtctcactctgttgcccaggctggaatgcactgatgcaatcacacctcactgcagcctgaaacttctgggctcaagtgatcctcccatctcagccccctgagtagctgggactacaggtgtgtgccatgcgctggccaacttttttttattttttgtagaaacagggtctcgctatgttgcctaggctggtcttgaactcctgggctcaagcgatccacctgcctcagcttcccaaagtgctgggattacaggtatgcgccactgcacccggcccagcagcattattcataatagatcgcttctgtaatcctatcacttcgagaggctgaggtgggatgatcatttaagcttaggagttcagtgtgggcaaaatggtgaaaccccatctctacaaaaaaatttaaaaattagcagggtgtgttggcaaacacctgtggtcccagctacttgggaagctgaggtgggaggatctcttgagcccaggagattgaggctccagtgagaagtggtcacaccactacactccagcccgggtgacagaggaagaccctgtctcaggaaaaaaaaaaaaaaaaaggctgggcgcagtggctcacacctgtaatcccagcaactcgggaggctgaggcaggagaatcgcttgaacagggaaatggaagttgcagtgagccgagatcacgccactgcactccagcctgggccacagagcaagactctgtctcaaaaaaaaaaaagacaaaaaccagaaacaatccacacatccattgactggtgaatagataaataaaatgtagtagatccaggcaatggaatactatttagcaacaaaaaggaaacaaaccattgatacatgcaataacatgaatgaaactcaaaaacatattcagttatataaaatttccagtaaaggcaaatctataaagacaggaggagatgagtgtttacctggggatggaggtgggagtggggattgaatggaaacaagcaagagggaacttttggagataatggaaatgttctaaaattggatagtcatgatggttgcataaatctatacatttactagaacttattgaactgtacccttataaagaatgtgttttaaggtacataattttacttcaaaaaagctgttaatacaaaaaaaaaggaaaagaaaacaatctacataaatcaattcacgctggttgtatggtaagtgggactgtcttcaggagctgcacataggactcaaataaaggaattatagaaaaatatactaataatgtaatatactaataaaaatgaaacattaagagaaattatgacagcaagaaatcaattacattctgttcatcaaccaacctccccagggctaggcctctcaacagtccaggaagtctgagtaaaccacggctctctcagaaatactttaaactatggacaccccagaaggaaccccagaaacacacagcccttgatggccaccccctgccagcatcaggtggctccaggcagttgtatagacagcggccctaatttgaactggtagcctaggatattggaagaccatttgatgctgagactccaagtcatagattcttaaagctacacagcaacataaaggccatctgaatcagtaggtgtttgtttgtgttatgtgtggccccagggcttcccaaaggggataaggagcaatgggggagaaatgcctcaggaatgaatctgggagcctgagaaggacccaactgaaatcagacgatgggaacaccaagcagggagatggtttaacacacctgtgggctattattcttcaactatgaaattaacatctatttagttggggtgaagagcaaattattttttactcacaaaaatgatgagacttttagccaggtgtggtggctcatgcctgtaatcccagcccattggaaggccaaggcaggtggatcacaagttaggagtttgagaccagcctggccaacatggagaaaccccatctgtcctaaaaatacaaaaattagctggacatggtggtgcgtgcctgtagtcccagctatttgggaggctgaggcacgagaatggcttgaacctgggaggcggaggttgcagtgagccgagattgcatcactgcacttcagcctgggtgacagagcaagaccttgtctcaaccacaacaacaaaaaatgatgagacttttatgtacaaaataagaaatgcattatatgcactgaaaatatcattacatttttactttatctaaaactatctcaaaagatagtatctttccattcataacagtcatgtataaaagatggagatatattccatgtctactataatgcaaaacatcttcaaaatgtgttttaaaatgatttcctctgtctgtcatgttggtaaaacgtttttcactgttctgtagttcatattccctcttctctttccttttatgaatatctgaactaggcagcctcttgggaagtgtatgaaagacttctaaaattagataataaaataaatcactcattcctgataaatagcattacacagtcaatcattttgtctcagaactttagcctattgctactgtagggaaaactttttgaggccatggtctcaggaccaggggaacagcctgcaatctcagcacgtgctttgctatgtggggagcaaagctgtcatcagagatagggcagtactagaaaggatgttggttttgtccacccgagaattctgtctgatggacaatgtctgaacgtcaatgtccaaatttcattttgccagtcacatcaggaattctagacagagactagaagttcattggtaccaagtttctgctttatgcccttctgatttagtgtgcctgacataggctggtgcccaacacagctggctggctggcctgagagcaacagcacaggacacttacacaggtgcagtctgcagtcagagtgcccggatccaagtcccacacctgctgtcactagctatgtgacctcaggccatgaacttaaccacgctgtgcctcagtttcctcaaatgcaaaatcgggatgatgataatgatagtgcccacctcagaaggaaggttgtggggattaaaggaggtattacagagaaagtgcttaggaaagtgcacagcacattccatattaactgctatgacttctataattaagtctggatctactgagccaccaaccactgcttcactcagagcagctctgcttttatcatttctacacattgggattccaccaaaagacaccttctcataaaaaagtttccatggtttttgttttgttttgtttcagtttgaacatcatggaaggattacaaccccctcactttacaaatgaagggtcagaggcccagcgggatgaggggctaccccgagtcctcccacaccctggggttgtctgagcctgggcccccgcctggcattctcacttcacctcccttcatggggccacattctcagtctcgaagagcacctgagtgcccagtgatatttatttgtgccaatggactcaacccaagggaaatattggcttgactcaggtttacggagaatattttgatctggttttgttccagttcaatagctttaggaaatgtgtaggtttcgttctatttaaaatcagtacgccaaactctttgattttgttttctctttctttttaagaaagtcctgactcagctaccctatgcacaaaactatattatttgggttcagttttggggctaggaaatttgaacaccacttcaaaaaggagccctgaatgtggagaagccacatcactaggccctagaagtcttgccgtttgaggaaccaggggatcaagctgtgagaatctcccaaccatcttgctccctgctggactcttgctttttttttttttttttgagacggagtttcactcttgttgcccaggctggagtgcaatggcacagtcttggctcactgcaacctccgcctcccagtttcaagcgattctcctgcctcagccgcccaagtagctgggattacaggcacccgccaccacgtccggctaatttttatatttttagtacagacggggtttcatcatgttaacctggctggtctcaaactcctgaactcaggagatcagcccacctcagcctcccaaagttctagaattacagatatgagccactgcgcccagccttttgctagaaaaggaaaaggtgcacatgaccaggttgagaatatcctcttttgcaacaggaagaacagcagccacactgtgtcccatctaaccactatctcaggcaaatcacctaaggttggagcctcggtttcttgtagaattattttcctcaaagcaccatggaaataattcaatgatgaaaatgggtaacaatcctaacccatacatgatagttcccttccctctttcctgcctgctaaatcctccctgcaacacacatccatactgcccttccagcactaattttctgtcttctaattctgtaaaattatgaatgggaaaatcacccaatgacaattgccgaggtatcttagaccttttgtttctaatcaactgaattgccacttcacctcttcaagcgatgtatagcccttagtcaagaccttggccaaaataaggtaattaccttttgacacaacctgggaagtcagagcatccttcctccgccagtctccgcaaagaggagcctcccccaagactagaaatccacacgctcttttcccactccacctcttcctcctagtaaaagtctgtgtgtgccgtttgcatcggcttgtagctggttagtcaaatcaggagatgaacgcaaattctccaagaaatttgaaatctgctttgagcaattcagtttggatctctttcgtttcctttccttaacagcccccaatacttgttccctacctgaggaaaacctaggagggcatggagatggctgtattcccagaccaaagattttccatttaaaggaaatgtggggtctggtttggtctgtttcagtgtcatcagggttttaaacaatcaaataaatctcccttgctagtagatacttcattctctgcccctgctcccaggattcatcaccatagttatcttcaaacatcacctcggtgccgatgacgacatggcacctggccaggtgtgaaggaaagtcaccttaaggaccttccctgtgaagggtataaacttggactcaaatacaacatgagtaggggaagaggtggccacttagggacttctgggccaggccacctggctgagaaatttgccatgaggaatacctagttcacctctacacgtagctataagggcttcttccacttcagacatgtgatgtggcttacgcaacagtcaagcaggaattatgccaatataaaataatcatgcagtgtcatgatgtagctgctcctttagtctcccccactttataattttcggtgccaaccattggatgagctcaagcttgccaaggcacattccctttccctctgtgtgccccacagaggacccagttactgggagaccactcagccctcattgcagttctaacaggtctagcccaaaggccttcaggctagtcaacttcagattactttggaacatgcttgctctttgttttttgagcacattttgaaggagatccagatgcccggggtggagtgaggctcctaaggtacatcattaagctttctcagggaagtaagatcagggtggtatgggaaaaagagcaccagctttggaatcagacaaagctgagtttggaacctggctctaccacctacagcaatgccatcttggaaaaagtgcccatgattcttgagtagccatttccttctctaggatttggaagggtttctttgaaaagcagagacactgtatgtaagttgcctggcacacaatacacattcaataaacaggactcattatattcatctgggtgggttctttctccggaaagtggatggatagccggataggggaacttgtatccaaaaatcttatttcccactcatcaaatcttaccagttactctcttcacattttcttctctttccccttcatcattcaaggaaaaaaaattggcggggcacagtggctcacacctgtaatcccagcactttgggagaccaaagcaagagggttgcttgatcctaggagtctgaggccagccggggcaatatagtgaaaccctgtatctacaaaaataaaaaataaaatagctggatgtgatggcccatgcctgtggtccctgctactcaggaggctgaggcaggaggattgcttgagcccaggaggtggaggctgcagtgagctatgatcacaccactgcactccagcctgggcgacagagtgagaccctgtctcctaaaaaaaaaaaaaaaaaaaaaaaaaaaaccagaaaaaaaagtttaaaaagaagcaactttagcacagtgatcattctagatgtctctttttccaaatgaactggcctcaaaatcctttatccttgcacagtacttacaaagagtgcttgcttacactgtatctataacctcataacaaccccattaaaaatgttttctctctcattttaagaaaaaagaaactgatactcaggacagggtaaattacttggtcaaattcacatagatagaaagcaggaaagcttggtttcaaatcaagatcctctgattcctttttacatgttctgttatattattcaggaaaggaaactctttgaaccattgtcagcctttgatacagatgtttcttgaattggttagcagagaacagagctcttaaagagtgttcataggacaagtaagtctgattggaggaaagagtcagacatggcagtgatctggaatttggagtcctgagaagtaggtaggggtgccagtggtgtttcctaagaagggaagaggtagtatgagagcactcatgtcatgaaatgtggtgtaccaaagaaaggaaacatatctgaaagagatatggaagagtatggaaaatacactttcccaaagttataatttcaccttaggccagtcccatctctctactatattgacttcttaaacctttccaaccttttcatgtccttttctcaggaatcctgtcacccacaagaatgtagcccactttgttcatagactggaaatggctggggacacagcagaatggaagcccatggttccaggtgaggccgtctggaaagagagagtctggtgaagggattaaggaggaaaaaaactctctggtgaccgagtaggcacaggttagcacaatgctaggggaggagcagagggctaccaggtagctgaagtgggtacagcccccagatttcaagaacataaaccctgagggtatttgaagaggaaggagtgtgcagctaaatacagggtgagaatcgaaagattaacagaaacagcatttaagagtgaggacaatcaaaatcagaagtgtcagaggataacaagagaggaggaggctgtttgtgtatacttgtgtacgtgtacttgtgtgtgtgaacagatgacaatattaccacagcagcttcaaccccacttcctgttgaagagtgtttgtatgtcactaaaggtaccattcaagtgatgggaacatagaatgttagaactagaaggaaccttagataatttcacataaattagaactctcaggaattgagtgactggcctaaagtcacacagctactcagtggcattgctagcatgcctctgtacagttcatcgtctttggcacacagagtcagaaaaatacttcagcaaggaatcagaggaaaagaattaaaaacactcttcaaaagccaccaaccaacagcacaaacaagaagacagaaagaagagaggaaaatgttccagaacgcacaagttcagttacgaaaagtaccacacaaaaagacaatttagtcttaggaaaaacagacactcaaagcagaaaaggcataaaatactgtctcagaaagaaatgcaaaaaacaaaaaagattaattttatggacagcttgatgccagagtgtgataataaagtgcatgccataaatatttgattttgtgtgaagaaatacagggaactggtttgtgtgagaggaaggaggtttgggtggtcactgaaatttaaatcaaaaaagaagatgaataagcctagtttgttaggtgaaagcctgcagttgggtgctccaaaaaagaagctttcagtaggtttctcagtgatttataaatacacgtggacagtttcagaaacaaagtatctactagagctataaactagtccttggttttcactcttgccccagaaatggttagaaatgaaatacgtgtttaacaagtatttattaagttctcatcatgtgctaatacctaaaattgcaaaactttaaacaaaatgagattaaagcaaaagttgtaacgttgtaatacacagagatgtaatgcacatgacaactaactaatttgacatctatatcaaatagatataaatgacagaggggtaggtgataaactgaactgtaagactatcaggttcctacattttacatgaagtgataaaatattaactctatgactctaaaaagttaggaatatatattataatgtctaagcaatcacttaaaatgcaaaaagactaacagataaattttttaaaatattaaattaacccaaaaagagccaggaaagcagtacagagaacaataacagatgagacaaatagaaaacaaagaaaaaatatagacctaaatgcaatcaaatcaataattacattaaatgtaaaaggactaaacattccaaataaaagacagagattgtcagaatgggtaaagaagtaagacccaagtatatgctgcctataaaagacacagttttaatatagggacacagataggttaaaaataggaatagaaaaaaaatataccatacaaacagtaagcataagaagactgaagtggctatattaatgttggataaagtagacttcagggcaaaaaaaaaagtattagtggagataaacaaaatgggagcctctggaattaagcattagttttctaactacagaacctaaataatcaaagaaagccaaagtgcggctggggggaaatgtagtacgtacagcaattttcccaaattccctgtagtttattttgaaaataatttaagacaacttggttcaatcatacttaacttcctgagttctcactaggaaagataaaaggaaaatttttgaagaataggctcttcaacaagaagggaaacctggaaacactgagctgtgtggactctccagctttatgtataattgacatgaacggggatgaccaactatttgtttaacaattatttattaagttctcatcatgtgctaggcactgggttaagcatttggtgaacaattcacacctagccccttccctcatattgataaaacaaaaaagccaacaagtcactataccagctataaacagtgataattactttttcttaaaattttgttttcctttgattctaagggtacatgtgcaggtttgctacatgggtgtattccatactagtgggaactgggctcctagggtacctgttacctaaatagtgaacactgtacctgatgggtaattttttaaccctcaaccccctcccaacctcccctcttttggagtcctcagtgtctattatttccatctttatgtacacgtgtacccactgtttagctcccatttagaagtgagaacatgcagtatttgcttttctgtttctgagttaattcacttagcataatgaccttcagctccatccatgatgctgcaaagggcatgatttccttcttttttacagctgcaaatggtgataaatattatcaagaaaatactcatgatgctgagatagagaataccaaatgaaaaaggaaacctgcctaggatagcatgatcagagaaggggatcagaggaggtaacatttaggaagaggctgcaaacagagacaggggtgaggtcaggggaacagtgtgtacaaaggcattcagggaggaaagagctaaggagtttctaaggaactgacatatggccagaatagctggagctcagagtaaggcaaacaaggaccaaatcttgtgggtgagctctaccaaacctccaagggacataaaatccaaccttatataaaattgtccaggggaggagacaagatggctgaatagaaatagctccggtctacagttcccagcatgagcaatgcagaagacgggtgatttctgcatttccaactgaagtaccaggttcatctcactggggagtgccagacagtaggtgcaggacagtgggtgcagcacaccatgtgcgagccgaagcagggcgaggcatcgcctcacctgggaagcgaaaggggtcagggaattccctttcctagtcaaagaaagctgacagatggcacctggaaaatcaggtcactcccaccctaatactgcacttttccaacaggcttaaaaaatagaacacaccaggagattatatcccgcacatggctcggagggtcctacgcccacggagtctccctcattgctagcacagcagtccaagatcaaacttcaatgtggcagcgaggctcagggaggggtgcccgtcatttccgagttagttgtttgattaggtaaacaaagcggccgggaagctcaaactgggtggagcccaccacagctcaaggaggcctgcctgcctctgtaggctccacctctgggggcagggcatggacaaacaaaaagacagcagtaacctctgcagacttaaatgtccatctctgacagctttgaagagagtagtggttctcccagcacgcagcttgagatctgagaacgggcagactgcctcctcaagtgggtccctgtctcccgagtagcctaactgggaggcacccccgagtaggggcggactgacacctcacacagccaggtactcctctgagacaaaactttcagaggaacgatcaggcagcagcatctgcagttcaccaatatccgctgctctgcatacacaggcaaacacaggctgatacacaggcaaacagggtctggagtggacctctagcaaactccaacagacctgcagctgaggctcctgtctgttagaaggaaaactaacaaacagaaaggacatccacaccaaaaacctatctgtatgtcaccagcatcaaagaccaaaggtagataaaaccacaaagatgggaaaaaaacagagcagaaaaactggaaactcttaaaatcagagcacctctcctcctccaaaggaacgcagctcctcaccagcaacggaacaaagctggacggagaatgactttgacgagttgagagaagaaggcttcagacgatcaaactactccgagctacaggaggaaattcgaaccaatggaaaagaagttaaaagctttgaaaaaaaaattagacgaatggataactagaatgatcaatgcagagaagtccttaaaggacctgatggagctgaaaaccaaggcacgagagctacgtgacgactgcagaagcctcagtagccaatgcaatcaactggaagaaagggtatcagtgatggaagatgaaatgaatgaaatgaagagagaaaagaagtttagagaaaaaaagaataaaaagaaatgaacaaagcctccaagaaatatgggactatgtgaaaagaccaaatctacatctgattggtgtacctgaaagtgacggggagaatggaaccaagttggaagggacagtctgcaggattttatccaggagaacttccccaatatagcaaggcaggccaacattcatattcaggaaatacagagaacgccacaaagatactcctcgagaagagcaactccaagacacataattgtcagattcaccaaagttgaaatgaaggaaaaaatgttaagggcagccagagagaaaggtcgggttacccacaaagggaagccgatcagactaacagctgatctctcggcagaaactctacaagccagaagagagtggggaccaatattcaacatccttaaagaaaagaattttcaacccagaatctcatatccagccaaactaagcttcataagtgaaggagaaataaaatcctttacagacaagcaaatgctgagagattttgtcacaccaggcctgccctaaaagagctcctgaaggaagcactaaacatggaaaggaacaaccagtaccagccactgcaaaaacatgccaaattgtaaagaccgtcaaggctaagaagaaactgcatcaactaacgagcaaaataaccagctaacatcataatgacaggatcaaattcacacataacaatattaactttaaatgtaaatgggctaaatgctccaattaaaagatacagactggcgaattggataaagagtcaagacccatcagtgtgctgtattcaggaaacccatctcacatgcagagacacacataggctcaaaataaagggatggaggaagatctaccaagcaaatggaaaacaaaaaaaggcagggtttgcaatcctagtctctgataaaacagactttaaaccaacaaagatcaaaagagacaaagaaggccattacataatggtaaagggatcaattcaacaagaagagctaactatcctaaatatatatgcacccaatacaggagcacccagattcataaagaaagtccttagtgacctacaaagagacttagactcccacacaataataatgggagactttaacaccccactgtcaacattagacagatcaacgagacacaaagttaaaaaggatacccaggaattgaactcagctctgcaccaagtggacctaacagacatctacagaactctccaccccaaatcaacagaatatacattgctttcagcaccacaccacacctactccaaaactgaccacacagttggaagtaaagcactcctcagcaaatgtaaaagaatagaaattataacaaactatctctcagaccacagtgcaatcaaactagaactcaggattaagaaactcactcaaaaccactcaactacatggaaactgaacaacctgctcctaaatgactactgggtaaataatgaaatgaaggcagaaataaagctgttctttgaaacaatgagaacaaagacacaacataccagaatctctaggacacattcaaagcagtgtgtagagggaaatttatagcactaaatgcccacaagagaaagcaggaaagatctaaaattgacaccctaacatcacaattaaaagaactagaaaagcaagagcaaacacattcaaaagctagcagaaggcaagaaataactaagatcagagcagaactgaaggacatagagacataaaaaacccttcaaagaattaatcaatccgggagctggttttttcgaaaagatcaacaaaattgatagagcgctaccaagactaataaagaagaaaagagagaagaatcaaatagatgcaataaaaaatgataaaggggatatcaccaccgatcccacagaaatacaaactaccatcagagaatactataaacacctctatgcaaataaactagaaaatctagaagaaatggataaattcctcaacacatacatccttccaagactaaaccaggaagaagttgaatctctgaatagaccaagaacaggctccaaaattgaggcaataatcaatagcttaccaaccaaaaaaagtccagcaccagatggattcacagccgaattctaccagaggtacaaagaggagctggtaccattccttctgaaactattccaatcaatagaaaaagagggaatcctccctaactcattttatgaggccagcatcatcctgataccagagccaggcagagacacaaccaaaaaagagaattttagacctatattcttgatgaacatcgatgcaaaaatcctcaataaaatactggcaaaccgaatccagcagcacattgaaaagcctatccaccacaatcaagtgggcttcatccctgggatgcaaggctggttcaacatatacaaatcaataaatgtaatccaacatataaacagaaccaaagacaaaaaccacatgattatctcaatagatgcagaaaaggcctttgacaaaattcaacaaccttcatgctaaaaactctcaataaattaggtattgatgggacgtatctcaaaatcataggagctatctatgacaaacccacagccaatatcatactgaatgggcaaaaactggaagcattccctttgacaactggcacaagacagggatgccctctctcaccactcctattcaacatagtgttggaagttctggccagggtaatcaggcaggagaaggaaataaagggtattcaattaggaaaagaggaagtcaaattgtccctgtttgcagatgacatgattgtatatctagaaaaccccatcatctcagcccaaaatctcctcaagctgataaacaacttcagcaaagtctcaggatacaaaatcaatgtacaaaaatcacaagcattcttatacaccaataacagacaaacagagagccaaatcatgagtgaactcccattcacaattgcttcaaagagaataaaatacctaggaatccaacttacaagggatgtgaaggacctcttcaaagagaactacaaaccactgctcaatgaaatagaagaggatacaaacaaatggaagaacattccatgctcatgagtaggaagaatcaatatcatgaaaatggccatactgcccaaggtaatttatagattcaatgccatccctatcaagctaccaatgactttcttcacagaattggaaaatactactttaaagttcatatggaaccaaaaaagagcccacattgccaagtcaatcctaagccaaaagaacaaagctggaggcatcacgctacctgacttcaaactatactacaaggctacagtaaccaaaacagcatggtactggtaccaaaacagagatatagaccaatggaacagaacagagccttcagaaataatgccgcttatctacaactatctgatctttgaaaaacctgagaaaaacaagcaatggggaaaggattccctatttaataaatggtgctgggaaaactggctagccatatgtagaaggctgaaactggatcccttccttacaccttatacaaaaattaattcaagatgcattaaagacttaaatgttagacctaaaaccataaaaaccctagaagaaaacctaggcattaccattcaggacataggcatgggcaaggacttcatgtctaaaacaccaaaagcaatggcaacaaaagccaaaattgacaaatgggatctaattaaactcaagagcttctgcacagcaaaagaaactaccatcagagtgaacaggcaacctacagagtgggagaaaatttttgcaatctactcatctgacaaagggctaatatccagaatctacaatgaactcaaacaaatttacaagaaaaaaacaaacaaccccatcaacaagtgggcgaaggatatgaacagacacttctcaaaagaaaacatttatgcagccaaaaaacacatgaaaaaatgctcatcatcactggccatcagagaaatgaaaaatcaaaaccacaatgagataccatctcacaccagttagaatggtgatcattaaaaagtcaggaaacaacaggtgctggagaggatgtggagaaataggaatacttttacactgttggtgggactgtaaactagttcaaccactgtggaagtcagtgtggagattcctcagggatctagaactagaaataccatttgacccagccatcccatcactgggtatatacccaaaggattataaatcatgctgctataaagacacatacacacgtatgtttatagcagcactattcacaacagcaaagacttggaaccaacccaaatgtccaacaacgatagactggattaagaaaatgtggcacatatacaccatggaatactatgaagccataaaaaatgatgaattcatgtcctctatagggacatggatgaaactggaaaccatcattctcagcaaactattgcaaggacaaaacagcaaacaccgcatgttctcactcataggtgggaattgaacagtgagaacacatggacacaggaaggggaacatcacacactggggactgttgtggggtagggggagaggggagggatagcattaggagatatacttaatgtaaatgacgagttaatgggtgcagcacaccaacatggcacatgtatacatatgtaacaaacctgcacgttgtgcacatgtaccctaaaacttaaagtataataataataaaattttaaaaaatgtccatatagtagaaaaagaagtaacactttccttactcatttacaaggctaaccttgttgccaaaaccacatgaggataatacaaaaagaaatggaaaattatgagacaatctcgctcatcaaatagatataaaaattccaaatccaacaaatagtaatatttacataggccctgggaattattatgaaatagcccaaagcaccttggaaaactggtgtaacaattcattgtcgcttttcatactggaatatgctttcataatgtttttcactggaaaatgtgtacctgactgagatgcaaacaagcttttaatagattgcacttaggtcctggaaacactagatttcagattgtatattgcagaagagaactggccctatgcaaattcgtggataggtaaattttgcctttagaacctagtctgctcctctccctaccctctgcccacaacttcaccttaaatggtcctattacctttccctctggggaaaggctttggggtcagggttggccatttactagctgtgtaatctctcttaaaacagtggcaatatataattccttcagctgttatataatgacaaaataaaataatacatggtagatgtgtagtacagcacttgggaagtagcaggatctaagtcattttttttctgtttgtagaatgaaagatgttgctctatgttctgggattgctggcctttcaggagcagagaggtatgatagaaaataatgccttcaatataaaattttaatgacttacatacagagtaatccatcaaccagattccaaaacatactttgaggggcaagtatctgttaaaggcttaattttatttgttcccagatagttcgaattgcctttgacagtcctttttctatcataaaaaccatctctttcttttacaagtctcagctgcttatatccaacaaaataaaagcatctcattaaacctcagccctctttgatgactcaacaaatattcattcattgaacctattaaatgtaaacatattacttttaaaaaacatatcttcaaggtcattccttggtccatccaagtgagtatcattaaatccatacccaagccatctaacacttgatatcataggagtgcataattcagtcagaaaggtggcctgcaaaagcagaaccagatttccatactcaaaaagaggagttctggcccggtgtggtggctcacgcctgtaatcccagcattttgggaggccgaggagggcggatcacgaggtcaggagatcgagaccatcctggctaacacagtgaaaccccatctctaccaaaaaaatacaaaaaaattagccaggcgtggtggtgggtgcctgtagtcccagccactcgggaggctgaggcaggagaatggcatgaacccagaaggtggagcttgcagtgagtggagatcacgccactgcactccagcctgggcaacagagtgagactccatctcaaaaaaaaagagttctgtttgtctatttcacaactaaataaagcatattgatgcctttgtgaactcccaatgcctagtttcccactttcaattctgtagtagagggggaagtaacagagtgatttggagtatatgacatggctaagacattcatcatagatccatcactgggtaggatgtatatcacatcacaggaagcttttgctcagtttttttcctatagctctttccactgtggggcactccagccataaagagggaagactatcttcttctttttttttaagacagggtgtcactctgtcacccaggctggagtgcagtggaatgatcacaatcacggttcactgcagtctcaatctcccatgctcaggcaatgatcccacctcagcctcctgagcagctgggactacagtcacatgccaccatgcctggctatttttttctattatttgtagagacaagatctccctatgttgtgcagactggtctcaaactcctgggctcaagtgctcctcccacccttgtctcccaaaatgctaggattacaggtgtgagccactgcacccatccctttttttttttttttttttaacattcctagatactaaatttcaaaccacaactagcccaaaattagctctgataacaagtgcttgactggatgactgactgcttatttctatggatactggttctccatgacagttatttggattctgatatgatgcctaattattaacgtactccttgcctgcttcctatcccaaaacaaatatcttaagctccaggaaggcaggactgtgattgactcaggacatccatgctttactgtccttgccactgggaaagaccctcagggaagaggatcaagacttaactgtccctgtgggagctctggagaaatgaacccaggatgtaaggctaatctgatcatctgaatcaccaagtctagacggggaatggcaacctgggatctgagctatgcataaatcaacagccaagagtcacacctggtggcctgggggacttaattaagtagggggtagagttcttaacgatttgggctcttccacatcaccgcagatgacttctgtggtcctatttctaaggcaggtctgtctggttggaggaagagaacagccaataacttgaggacatgaaaaaccaaaatcagaccccccagataaagagatcctgttagacccaagactttctgttaatgatttaattcatattcaacaggctgaatagatcaaatgtaaacatattgcttttaaagggcacttttgtccttccttgatccatgtaagtcgatctttccactggcaagattcactgagaaaaagaaagagttgacaatgcattctaaataattttgacctcttcttggttgtaccccatccagtccagttgtccagccactcattagataaactagttcagcaatgactaaaattgttcatcagccctgctacctaagtagaccctatatcctcacagccatccttactcctccctgttataaaatatctccttttcctccccttagaaacagagatagagtaccagatgcaaatgttatgatgaaatccagctcaagtggtagtgatctgtccagttttgtaaaggcaacacctgtgcatactaggaccagtctctagttctgaaacccacctacagctttaattatgtcacctactggaatcttccttcagattctaccttgctcctctactggcttccagagtatgagtccttatgaccacagtcttcctctgaggtgacctccagcctctgccaagctcaactcttgccaatgagccaacgttcttagccccaactacacgtagactcagctcagattctacccaagtccttaagcgtgacattccccaggaaatataaaaggtagaatgcactgtacctaaatgcagcccctaggacgttcatttcagtaacatcttcatgttgcaatactcatgagagggctttgatccttcacaccaatcgctaataaaaagctctcagctgggcgcggtggctcacacctgtaatcctagcactttgggaggccgaggcgggcggatcatgaggtcaggagttaaagacaagctggacaacatggtgaaatcccgtctctactaaaaatacaaaaaattagccaggcgtggtggcgggcacctgcagtcccagctactcgggaggctgaggcaggagaatggcgtgaacccgggaggcagagcttgcactgagccgagatcgtgccactgcactccagcctgggcgacagagcgagactctatctcaaaaaaaaaaaaaaaaaaaaaaaaaaaagaaaattagccaggcgtggtggcacatgcctgtaatcccagctactcgggtggctgaggtaggagaattgcttgaactcacgaatcagaggttgcagtgagccgagactgtgacactgcactccagcctgggcgacagagtgagactctgtctcaaaaaaaaaaaaatgcttagctctctgggcagccagcccattctcacctttacctaatataaatctgtaccagggtgagaatccaggaagcagagggtccgaaaatgtgcttctttcttctaaaaaggaagacacatattccccagatcaaattaaaaaaataaatccaggagaaaatacttgctctttcctaacttatattcataaggttctcttagtggacttctgtagccttagtgaaacccaaactagaatgtttagcaaaatccccaaatgtatcctattttcaatattttcagaactcaatatttttagaatgtaaaattgtgttttataaagaaataattcatttgtcatgtacattgatgacatgaaatgtacataaaattcagaaaactgaaattatcagttaacagggaggttaatagaattatttttacagcaatttagattcacagaataattgggaagaaggtacagagacttccaacatactcccctgaccccacacacgcacagcctcccctactgtcagctctccctaccagagtggtgcttgttacaattaatgaacctatattgatacatcattatcacctaaagtctatcatttacattagggttcactcttggtattgtacactctgtgagttctgacaaatgtataatggcatgcatcagccaatgtagtatcatatagaatagtttcactggcctaacaatcttgcgctccacctattcatgcctccttccccctaatccctggcaaccactgatctttttactgcctctatagtttaccttttccagaatggcatacagctggaatcatacaacaagtagccttttaatattggcttctttcagttagtaataagcatttcagtttccttcatgtcttttcatggtttgatagctcatttcataatattcccttgcctggatgtaccagtttatccattcactaactggaggtcatcttggctgctttcaagtttttgcaattctgaataaagttgctataaacatctgtgcacaggtttttgtgtagacataagttttcagctcttttgagtacattccaaggagtgcaattgctggatcttatggtaagagtatgtttacttttgtgtgaaaccaccaaactatcttccaaagtggctgaaccattttgcattcccaccggcagtgaacgagaattcctgatgctccacatcctcaccagtatttggtgttgtcagtgttctggattttggtcattctaataagtatgtagtggtatctcgttgctttgatttgcatttccctcgtgacatatgatgtggactatctttttgtatgcttttatgccaactatgcatcttctttggtgaggtgtccaagtttttgcccatttttaaattgtggtgtttgttttcttattgttgagttttaagagttcttcgcatgttttgggtaactgttctttatcagatgtgtattttacacacatttctcccagtctgtggcttgtcagattctcttaacattatcttttaccaagcagaaggttttaattttaatgaagtttagcttatccatttttttcatgaatagtgcctttagcgttttatctaaaaagtcatcactgaggggtgttgtgcttccagacagtgctgctgcgtgctagtgcccgggtccctcaaaaaagaatcttttaaaattttttaaataataatgtcatcaactaacccaaagtcatctagacattctcctatgttatattctgagagttttatatctttgaattttacactgaggtctgtgatccattttgattagtttttgatgagggtataaggtctatgtcaaagttcaactttttgcatgtggattccagttgttctggtgtcaattgctgaaaagactattctttttctactgtattgcctgtgttgttttgtcaaagatcagttgtgtatttctgtgtaggtctattttggggctctctagtctattccactgatctatttgtctgttctttcactgataccacactgtcttgattactatagctttatattaagtcttgaggttggacagtgtcagacctctaactttgttcttttccttcaatattgtcttggctgaatgactttttaaaattaattaaaacatttttggatagaaactttgccactggtataattccttggcttatgaaacatatatttatgtatcttaatttttaatgactgagaaatgtgtattattctttgccatcacataaaatgaccccagattgtattatcttttagtggttttactatttctataacctattccttttgttctcaccccttcagttcctccaagcctctctccttcataccatgtaattaagtgggaatcagtctaggtttccaggggaaccttattttacagttaagtttaagatagctgatctaagagttcctgaggagaattttttgtctcttctgtggaatgaattatcctcaaaagttctagattcagaggcataatccaggcagccatgatacccaagagccttacgtcaagttgtgaggcactattctgatacaactataataatgtcaacagtaattagcagctaaatattaaatgcatcactcttcaaaaattcagcttctgggaaattttccccttcctttcagttttccccccagttcacttttaaaaaaataagcaacttgagctccctctgaacttctaaaactatttaatacatgtcactcttaaccatcacccaaacctgcatctatcagtgacacattccccctcaaatcccccacccagacacctgcaggttacttttcaatgcatctttgcatctcgaaatctgggaaggactgtagcttgggaaaaattacacagttgagggcttagaattgatctaatgaaagttgataagacttatttgcctgggtcattgatttgtagccaagcccacttcaatgagtccagtttctatgttatcacttttcacctttcatcaagagcaggcactggagggacaacggaatccacaaagccagtattgttgactgtgattaaaaagagtgtgggattcactttctcctacacaagggggaaaccgaagctgactcaactaaaaggagggcaaaaggagtcctggccagtgtcacctcacctggagagaggatccagagaagactggggtttccattgtgcagtgtctggggaatgctagaagaacagggctcttattgtttcacttccagcacttaactaccaaagatgagagcttcctttctacttattacccagagtccagagtcactgggagaggtaatcagatcatactgtaacatcctttgaactccctggagagcttgtgctacagtaaagcatgtgggatccttatcaactctaattctctggggtcttcctctgccatcaatttcacctgtgcagagtcattcaaccttgttcagtcattcattctttgctgctgctgtttgtttcaagtccattagaagctcattccaggaagcagaaactaacatagaaaccagtgtcagcctcctgagctccaaagcacacctgacccagggatggggggtggttagttagcatgaagtcaacctctttccaaatactaaagtaatcatagtacaaacggattctgtaattaaaaccatcaaaagatgccttggtcttcagtcagcattattgtgcccacattaaccttccccacaagcaaaaacactactttttcctctctgttttctacattcttcttcattaactccaaatcgagagtttcattatttttcaaatcagaaaggagggtttacaaaaggatctgcagatttgaaagatgctgacaagaaagcaaacatgaatggaaacactactttttaaaaatgtatttccttccaggaagagctgagcagtacaggcatgtggcagaataggaggtcatttcaaaatatatcatgttgagcttcactcccaattatgagcagcaattctgtttgataattacctgggcaatacggaaatggatcccatttacaagcaaacaaaaatgtgtttcactgcaatatgctccattctgaaaacgttcccccttttaccaacttaataatcataccattctctacataagatttctttttctcactcacctctcctctgtactgcttggattctctcccatctggccaatgagtctaaaatgcagggacttatatcttaatttcatttttcaaaataagacttcgctcatgcctgtaatgccagcactttgggaggccgaggtgggcggattacttgaggtcaggagttcaaaaccagcctgaccatcatggtgaaaccccatctctactaaaaacacaaaaactagccaggcgtggtggcgcaggcctgtaatcccagctacttgggaggctggggcaggacaatcgcttgaacctgagaggcggagattgcagtaagccgagattgcgccactgcactccagcctgggcaacagagcaggactccgcctcaaaaaaaaaaaaaaaaaagctcaaaagctcaaaaaggtcaaaacctcttaacatcataggaatagatgaatactttcttgacaatgttacatatgaatatacgtagaaacaatattgcctgtatataaaacaaaaacatatatattttctctgttaaattcttaaataaaacaaggccatcaactatcactatttctaactctgtttaatatgattttggaagcattattctaatcaagtagataggaagaaaaaattagaagtataacccttggtgatactaaaaattcattagaaaatgtataaataataagaaattgaaggtgcctaggtacaaaattaatattcaaaaatcaagtatttgtgtatacaaataacatctgcttagaatttataatgaaaggaaagatcccaattacaatagtaacaaaagataaagcacctaacagtaactgaaaaaatacatacaagagaattgtaaaatgctactaaaggtccacccctccaaaaaaaaaaaatatctttagcatatgaaaaatagtatgtgttcccagataggaaggatcaacatcataaagacattaatagttcctaaattaatctaaaatgtatgtcatcctcataaaatattaaatattatttggaactacacaaaattatcctaaaattcatttgaaaaataaatatgcaagaattgccaggagaattctggggggaagatagtgaaagaagtctattctactaaaatttagctaattaaaacagtgtggcactcattcataaagatgtcaacagaatagactagaaaatcaagaaaatttcttaattcatacaggagtttttttaagataaaggtggaattttaaatcagtgcagacaagatggatcactcaataaacagtgttagacaactgggtcttcatctcaggaaaaagttggatttgtattcttaaataataaaataaaatccaagtgcatcaaagatttaaatgtgaaaaattaaccataaaaatattagaagaaaacatggaaaattgtttttatgaatcttgtagtggggaaaaccctttctagtgtcccagacactgtgagtggtctgttcattataccagttgtccactttcctcttctttccagagaaacagaaccccaattctgttcagggtgagaataagcctaaccccaaaggatgggtcatactggctgtcatgttctccactttcccacactcccttgcagctacagtgtctgtgtggcttggtttgggtcaataagacataactggaaatctgatgggaaaatccttgctttctcaataaagatggatagacatgctggtgtcccatctcctttgaaaggttagttctgtagaaatcacctagggatcagataagagaggccaagagagtagaataaaagatattagccctgacattgttgaacagctgaaccagtgctatcaaccacctattcctggaattctcactatgaaattttaaaaataaaatcctatttacttaagccactgtgtttagagttttagtttcttgcagttgtgtgattcttggaatcctacctgacacaccatgaatgccataaaattcagaaaccctaaaggaaaagattgagcaatttgacaacatgaaaaattttttaattctttgaaaataaaaaggattccaaaaagaaaaaaaaaactaatataagatctttttcatttacattatagtccagagctaatatttttactatataaagagctcaccaaatataaagtaaaagaccacagtccagcaggaaaatgggcaagggatagaaacagtgttcatcaggaagtcctaacagagcaatcaggtaacagaaagatataaaaggcatccaaataggaaaagaagaagtcaatttatctctctttgctgatgatataactctatacctagaaaattctaaagactctgccaaaagactcctggaactgataaacgacttccgtaaagtttcaggatacaaaatcaatgcatgaaaatcagtagcatttttatacactaaaaacattttcgctgagagccaaatcaagaatgcaatcccatttacaatagccacacactcaaaaaaataaaatacctagggatacatttaaccaagaaggtgaaagatctctacaatgagaactacaaaacactgctgaaagaaatcatagatgacacaaacaaatggaacaatacatgctcatggattggaagaatcagtatcattaaaatagttatacttcccaaagcagtcttcaggttcaatgtcattcccaaactaccatgtcatttttttgtatatgtgctgccgaagcgagcataccaatgtcatttttcacagaattagaaaaactattctaaaattcatatggaacaaataaagagcctgagtagacaaagcaatcctaagaaaaaagaacaaagctggaggcaatcactttactaaacttcaaactatactataaggctacagtaaccaaaacagcatagtactggtacaaaaatagacatataggccaataaaaaagaataaaggatccagaaataaagctgcacacctgtagccatctgatttttgagaaagtcaacaaaaaataagcaatggggaaagggctccctgttcaataaatggtgctgggatagctggctagccatatgcagaagaatgaaactggacccttacctttcatcatatgcaaaaaattaactcaagatggattaactatttaaacttatgtgttcatcaaaaaagaaatgcagatggctgttcatcacatgaaaagattttcaacctcactcaaaataaataataaaataataacaaaataattaaaactataggaatatagcattcctataaatttgtctgatagagatttaaaacaaaatactgtatttgtggagaaacggatactctcaggcatttttgttagaagagaaaaccgaaataacttccatggagagcaacttgtcaatgtcaccaaaattacagatgccaccccagcaatcacaacctgtgtatacaattaaagggctgacaataatctaagtttctgtgaatatagggcttgttacttaaattataataataattatgcagctataaaaaatgaagaggttctatacgtatagatgaagaacaatcttcaagatacattgttaaataaaacaaaagtcaaagtccagaatgtgtttgtcatgcagccaattcttctaaaaatatattaaaagggagtgagcggagattgcgccactgcactccagcctgggcggcagagcaaggctccgtctcaaaaaaaaaaaaaaaaaaaaaaaaaaaaaaatatatatatatatatatatatatatatatatatatatatgtaaagggaaaatatgttattgtacatttataaacttccttaatagaacacacaagaagctggtaagggtggctgtctctgagaaggagaactgaagtgctggtgttcccattatctgtaactataatgaaccaccctgaagcttagtggcataaaaccacatacattttctcatgctcacagattctgtgggtcaggaatttggacaagacgcagcagggatggcttatctctgcccattgatgtctggagctccagctgagaggaagtgattggcagtgtgtgactccaatggcttgcggctggaaaaatctgaaggtttcctcactcgcacgtctgggctcgggctgcgataactcagctggcgtttttaaccaacgtgcctacatgcgacctcgacacggagcaggggcatcctcacagcatggcagcctcagagcagtcagaccccttccgtggtgggctctgagagcaagggttccaacgagaagggcagatcagcatctgccttttatggctagcctcagaagtcacagagcctcccttccagcctgctccgttggttgaagcagtcaccagcctgcccagattcaggaagcagggacatagaaattgaaggtcatcaacttgctaacagttgttatccctacagagtggaatctggggagattttcattttccccattggcctacatttattgcctaatttctctaaacgagcaagtacaaactgtgttataagtgttttggaaaaatcatagatcttgcttaagattctcttccgtgcaacacagcaaatctatgtttctcatgcattttccttgtgagttcgatacagcgacagagttcagaaatacactgtatattttccataaactctttctacacagcgatgcatgacctaagaggcatcaagattacctgtgactgcatgagtgaaaggacatctcatttatctgcagaatcagggtcttgcaggcccagaagcactgcttccattttcttcacttgggccttctccagcggtgcacagagctctgtgggacccacaccctgcgtccttgtccttgtcacatgagggtagtgcaagcccaagagaacgagtggccggcctgtctttgtccttgagcctggctgtcctgcctttactggaagcttctctttctctgtctcttttctcctccttctacttttattctttgctctctgctcaccccctttaccctctctacatttttcctctttccccaattttctctctagctctctgtactctctcctttcatttactccctgcaacaatcataccacctccctaagcacgatacaaaaacaggtgagggaaggactggatgaaattaacaaagcaggtttacatggctctgttgccttttctcagctaccagttttggttggttggtttttccatctcaatctgtttcattttatctgtctcatttccttcttttttcttgtaataaaatatacacagcatgaaataaatcattttaaccattttgaagttcaaaacatttgcacagttcagggcactaagtacattcacattgtacatcaccaccacccgtctccagaactcttcatcttccaaaacagaagctctgtgcccaatacataaccagcccctcactctccacacacccaccccatggcagccaccattctactttctgtgtccataaatttggctacattaggtacctcgtataagtggaatctcatgatatttgtccttttgtgactggcttctttcactaaaataatatccttcaagcccatccatgtgctaacatgtgtcagaattttcttcctttttagggctaaactttattatttatctattgtatggatgtaccacattttgtttatttactcttctgtcaatggatacttgggttctcaggtaccattttttctcaaacaaggtgacatgggctttttcccttccctcacctcaaagaaggggttccctccccctgctccttcatcccagcccacaggcaggtccgctctccactgcgggagctcctcagaattggggccagccaccctcccccgacctttgtccaccctcttcctgattaatggcatctatttctatggcctttggtaccctccagggctggtgatgccaggcttctctctccaaagacaacttctcagagtcccaaacctcacacccaaccaggtatttcattgcaccacttacgactatctcatcacatggtcaaacccagaaatcttgatttttcccacccatccacttgcagaataaatgtcatcagaacctttctgtaagtctgacaggagactagaggtttgatcttcagggaaattaaagcttgctgctccagctccagacaccacacatagagaaggatgagagggagactcagagctgaaaagagggtaattcatagaaagtctgtacactctatggtaggaagcatatccagcactgctaccagaaaaataggaccagtccccaggcaagaacccccaggcagtttcgtcactggagaaactgagggtgtccgcaaaagtgaccttcagacatggctgtgtggccacttttcctcttgagaagcctcctggtaaccagtggcaaggccgagccatgcctacaaagctttgagtcatgcagtagggcctcactcttacctgtaaataaacagccaaggatcaacaggcatttaaggaaaacagcaaggtaagcagattatttagaaactgagaaataaataccaagagcagagctaaaggagttgaagatatttgcctctgggcagcaaagttgttgaatgggaaagaactaatatgttcaattgtgcattttttagtgctgtttgatttttaaatatgtttgtgtatatatatacacatatataggtaaaaataattttttaagagacagggtcttgctctgtcacccaagttggagtgcaatagtgctattgtagctcactgtaacctcaaactcctgggctcaagcgattatcccacctcagcctctcaagtagctgagactacaggcacgtaccaccatacctggctaatttttttaaaaaaatttgtagagtttcagtctcactatgttgctaactcctggctttaagagatcttcctatctcagcctcccaaaatgctgggattacaagcaagagccactggacctggccaggtaaatataattttaaaaaaagaaaatatgagtaccgccaacaacctatctgctcaagaatggagaaatctggaaattctctctgattcttcctttttttcccatcctacaaaactagtctatcactaagattcacccatttaacatccaaaatatttcttgattcatccacttctttccgtctttgccaccaccgtcctcaaatatgccaccagcacctcttcctggttatacacagccccgtattggtctctttccttccaaccttaccccttctcaaggtaatacacttattcttctcaaggcaataaaactgatcagcataaaaggtaaatcaggctgggcacagtggctcattcccataatccaacatttggggaagctgaagtgggaggatcacttgagcccaggagtttgagagcagcctgggcaacctagtgagaccccacctctaaaacagaagaagaagaaaggtaaatgagatcatgtaaaaccctaaaatgtctatcaccctcaaactgcaacataaactccaatagttacccctaaggtcctgctggatctgacccccacctacctgttcaatcccagcttgatttgctccactctcttccttgctcattaagctccagcctcattattttgctttcctccaattccaaaaaaaaaaaaaaaagccaagatctttgctgcttcgggcctttacctatgtcatctacatgcatggagatgtggttgcctttctcctcatccaacaggtcccatcccatccgagtctcaacagaaacatcacctccccagggagaccgtctccaccaacctatcaaaagtaagtcactcctgtgatcgcctatttcatcttacttgcttccttcatatcatttttcattgtattatctattcatttgctttatttttctgctcctccagcagaaaattagcaccataaaggcaaggaccatgccctatctctagtatctggcacagcacctgtttgaataaattactttctacagtgaatgcaaatatcatttgcatctctccaggcagttttccaggttgtactattcttcggaataagcacaacaaacttgcttaaggattaaagatgtctgacaacagttgcttcttagtgtgtgacacagcatcagccactctccaaactgctaagacgtctcccttgtggggctcatgcaacagtttatctatttatattggagggagtagagaataggaaaagtacacagacaaattgattcgggggtggggaagaatgctgtttttaaaaagtgatcaatacatcttccttagatagtagggaggaacccctatcttgacaggctttggggagatagggtcaaatgccaatttctacttgaatcacagcagtatgggtgccgtaacagcctagcatttcatcattatgatgactattaaaatggtaataatgcaagagagcagggaaccagacgatgaaaagggataggcagctaaatacctcactgtgttcttcagacattttagtcatagctacaccataatcattaaaaagatctgcaggatgttagagtaatgctggtgatggggcatttgcactttctttgacctgaaaagaactatctattttgttaccttaaactttaatccctgtcacttcttctttctttcttttttttttttgagacgtagtttcgctcttgttgcccaggctggagtgcaatggcacaatctaggctcactgcaacctctgcctcccgggttcaagcaattctcctatctcagcctcccaagtagctgggatcacagatgcatgccaccaggcccggctaatttttatatttttagtagagacgggatttcatcatataggtcaggctggtctcaaactcctgacctcagatgatccacccgcatcggcctcccaaagtgctgggattacaggcataagccaccatgcccagccatccctgtcacttctataacccatcttgtccaaaatcatgatgacttatcttaaggactattggacacacatttgaaaggaaaggtgtccactgagatgatgttgagatcggaaatcatacagtcctctcttccctcccacttataatggaacagaaacccaagtccttccttgaggagaaggaggaaccaaatgattcctcaacatcctttccagctgtaagattcaataactggatgatccatcatttcctgaaggaacttagcctaggagattggatggtagtaaactgtggaaatgtcataagcctcatcatacctgctaagcagtcaaagctatacatgagcatcctacaaaaagaaaagcccagaagagagaaagagaaaatataaaattttatatcagcaaacaccaggaggatgaaatcacactcattatttgctcattaagcaaatattcttttagcactcactatgtaactggcacagtgcttgaaactggaggcagatatgtaaaataaggccctgggctcaaagagtagtggagatggccttcaaaataaataattatgcacagtctcatgaatgctgttgtgagagtcagtactgcaaagttctgtaggaatccagaaaggtaagtagctctactgagagaataaagaaaaactttatcaaagagatgacatttgagttgaactttgaagtatggataggagtttcctggtaatttaggagaagggattgcaagaagaaggaatggcatacataaaggcttaaagacatatttggagtgagaggaccaaggctgagtttccctgtctgccctggtatcaaggcagacaaggaactgatttaaagtgtactgtacgccttgctgaaaccttagatttttttcctgtaaacaatggacataattgaatgacttttactaagtgtacttcatgatcagatttcttttgttaaaaaagaattctctagtagaattgccgaaaattaggaagggataaagtcaaggaaaccagtcacgaggctactattaataatccagccaagaaatgagggtgcgccttagcatataaaaagatgttcaacttcagtataatgagagaaattcaagctaaatccacactgagatacaatttctcacctatcaagatagtaaaaattcaaattcttgagaacacatgcagttggtgaggatttagataacaggctttcttatatattgctggttggagtacaaaatagtacaactcatatgggctgggcgcagtggctcacgcctgtaatctcagcactttgggaggctgaggtgggtggattgtttgaggtcaggagtttgagaccagcctgaccaacatggtgaaaccccgtctctactaaaaatacaaaaattatctgggcgtggtggcaggcccctgtaatcccagctacttgggaggctgaggcacgagaatcacttgaactcaggaggtggaagttgcagtgagctgaggtcacatcactccactccagcctgggcaacaaagcgagactctgtctcaaaaaaaaaaaaaaaaaaaaatagtagaactcatacagaggagaatttggcaatttcctgtgaaacaatgtatgcccataccctttgatctaactatcagatttttaggaatttaccctgaagatacttctacaaataccaaacaatgtatgtataagattatccaactgcagcattatttgtattaacaaaataatggaaatactgccaaatgcctattcaaaggagtctgattgaatagatgatggtagagtcacacaatagaatattatgcagctatgaaaaagaatgtgaaaaatctctataaattaatattaaatgatttccaggatatactattgaatgaataaagcaagatgcagaagataatatagaatataccaacttttgtttaggaatgaaaaggaaattaaaaatgtgaccacacatatttgcttatttttttaaaaaaagaaaagaaacacaggaaatacatttcagaaataagtgaaaaattgttaccaagaaaggatgggtgaaaatgagacagaagggataaggataagagcaatggggatatagttttttaagcaaagcctaatgttgaacacaaatataaaaagttaattgaacttagagataaggtaagcatgtcccctctctcatcactgctttcaacattgtaccgaaagtcctagctaatgaaataagacaaaaaaagtaagtaaaatgtatagattgagagggaagaaatgaaactgtcttggttcccagatgacatgatcatctatgcagaaaatctgaaagagcaataataacaacaacaaaaactcctggaactaataagcaattatagcacgtttgcacaaaacaagggtaatatacaaatgtcaatagctttcctacacaccaacaataaacaagtgaaattagaaattaaaaacacattaccatttacatttacattagcatccaaaaatgtgaaacaggtataaatctaacaaaatatgtaaagatctatatgaggaaaactacaaaatgcaggaaaaatataaaagaagaactaaataaaaggatagatatttcatgttgatgaacaggaacactcaatattgtaaaggtatcagttcttccaaatttgacctacgaagtcagtgctatcccaaacaaaatcccagtaagttattttgtagggattgacaaactgattctaaagtttacatagagaggcaaaaatcccagaataatcaataatacaatactgaaggaggaaaacaaagccagaggcctgccgctgtctgactttgagacttactctgaagctacaggaatcaagacagtgtggtattgtgaaagaatacacaagtggatgaatagaacagaatagagaccccagaaacagacatatagagagacattttttacaaaggagcaatgataatatgatacagcaaagatagtcttttcaacaaatggtgctgggacaactgaatatccacatgccaaaaaaaaaaaaaaaatctagacacagactctgtaccctttgcaaaaattaactcaaaatggatcatggaccaaaatgtaaaacacaaaactataaaattcttggaagataacgtaggagaaaacctaaataaccttgagtatgtcaacacctttttatacacgtcacccaatgcacaatccatgagagaattcatcaataagctggacttttctgctctgtgaaggacaatgtcaagacaatcagaagacaagctatagactcagagaatatatttgcaaaggagacgtctgataaaggactgttatctaaatacaccgaaaaacctcttaaaattcaacaacatgatttttaaaatgggcaaagtggaagggggaaatgaagagaggtgggtgattgggtagaaatttacagttagatcaaaaaataagttctttttttttattatactttaagatttagggtacatgtgcacattgtgcaggttagttacatatgtatacatgtgccatgctggtgcactgcacccactacctcgtcatctagcattaggtatacctcccaatgctatccctccctcctccccccaccccaccacagtccccagagtgtgatattccccttcctgtgtccatgtgatctcattgttcaattcccacctatgagtgagaatatgccgtgtttggttttttgttcttgcgatagtttactgagaatgatgatttccaatttcatccatgtccctacaaaggacatgaactcatcattttttatggctgcatagtattccatggtgtatatgtgccacattttcttaatccagtctatcattgttggacatttgggttggttccaagtctttgctattgtgaataatgccgcaataaacatacgtgtgcatgtgtctttatagcaacatgatttatagtcctttgggtatatacccagtaatgggattgctaggtcaaatggtatttctagttctagatccctgaggaatcgccacactgacttccacaatggttgaactagtttacagtcccaccaacagtgtacaagtgttcctatttctccacatcctctccagcacctgttgtttcctgactttttaatgattgccattctaactggtgtgagatggtatctcattgtggttttgatttgcatttctctgatggccagtgatgatgagcattttttcatgtgtttttggctgcataaatgtcttcttttgagaagtgtctgttcatgtccttcgtccacttgttgatggggttgtttttttcttgtaaatttgtttgagttcattgtagattctggatattagccctttgtcagatgagtaggttgcaaaaattttctcccattttgtaggttgcctgttcactctgatggtagtttcttttgctgtgcagaagctcttgagtttaattagatcccatttgtcaattttggcttttgttgccattgcttttggtgtttttgacatgaagtccttgcccatgcctatgtcctgaatggtattgcctaggttttcttctagggtttttatggttttaggtctaacgtttaagtctttaatccatcttgaattgatttttgtataaggtgtaaggaagggaaccagtttcagctttctacatatggctagccagttttcccagcaccatttattaaatagggaatcctttccccattgcttgtttttctcaggtttgtcaaagatcagatagttgtagatatgcggcgttatttctgagggctctgttctgttccattgatctatatctctgttttggcaccagtaccatgctgttttggttactgtagccttgtagtatagttagaagtcaggtagcatgatgcctccagctttgttcttttggcttaggattgccttggcgatgcgggctcttttttggttccatatgaactttaaagtagttttttccaattctgtgaagaaagtcattggtagctttatggggatggcattgaatctgtaaattaccttgggcagtatggccattttcacgatattgattcttcctacccatgagcatggaatgtttttttttgaaaggatcaacaaaattgatagaccgctagcaagactaataaagaaaaaaagagagaagaatcaaatagacacaataaaaaatgataaagaggatatcaccaccgatcccacagaaatacaaactaccatcagagaatactacaaacacctctacgcaaataaactagaaaatctagaagaaatggataaattcctcgacacatacactctcccaagactaaaccaggaagaagttgaatctctgaatagaccaataacaggagctgaaattgtggcaataatcaataatttaccaacaaaaaagagtccaggaccagatggattcacagccgaattctaccagaggtacaaggaggaactggtaccattccttctgaaactattccaatcaatagaaaaagagggaatcctccctaactcattttatgaggccagcatcattctgataccaaagccaggcagagacacaaccaaaaaagagaattttagaccaatatccttgatgaacattgatgcaaaaatcctcaataaaatactggcaaaacgaatccagcagcacatcaaaaagcttatccaccatgatcaagtgggcttcatccctgggatgcaaggctggttcaatatacgcaaatcaataaatgtaatccagcatataaacagagccaaagacaaaaaccacatgattatctcaatagatgcagaaaaagcctttgacaaaattcaacaacccttcatgctaaaaactctcaataaattaggtattgatgggatgtatttcaaaataataagcgctatctatgacaaacccacagccaatatcatactgaatgggcaaaaactggaagcattccctttgaaaactggcacaagacagggatgccctctctcaccactcctattcaacatagtgttggaagttctggccagggcaattaggcaggagaaggaaataaagggtattcaattaggaaaagaggaagtcaaattgtccctgtttgcagacgacatgattgtatatctagaaaaccccattgtctcagcccaaaatctccttaagctgataagcaacttcagcaaagtctcaggatacaaaatcaatgtacaaaaatcacaagcattcttatacaccaataacagacaaacagagagccaaatcatgagtgaattcccattcacaattgcttcaaagagaataaaatacctaggaatccaacttacaagggatgtgaaggacctcttcaaggagaactacaaaccactgctcaaggaaataaaagaggatacaaacaaaaaataagttctaatgtttgacagcacactggggcgactgtagttagcaaagatatgttaaattgctgctatgtagaagagaggacttgaaatgttcccaacacacagaaatgataaacacccaagacgatggatactcgaaacaccttgacttgatcattccacattctgtgcatgtaaaaaacattcacaggtaccccatcgatatgtaaaaacattatttatcaatagaagaaaaaattaatgagacagttttcaccatattgtaccctctaaattattaataacatttttgtgagagcaaaaagtatttgctatcatttaataatgtagttttaaaatataatttcatcttcatcccaaacttttcaattttttatttctgcatgttttatataataaataatgtattagtagagtaatatattaaaatcttcacaagtaaataaatatgtatatatctaaaaactgggcaaaagacttaaatgatacctcaccaaagaagatatgcagatggaaaataaaaatatgaagagatattccacatcatttatcattagggaatcgcaaattaaaacaacaataagatagcactacacccccattaaaggagtcaaaattcaaaacaccgaaaacaccaaatgctggcaaagatgtagagcaacaggaactctcattcattgctgctaaaattgcaaagtggtatagccactttggaagatagtttgatggtttcacatacaactaaacatactctcaccatatgatcgagcaagtgtgctccttggtatttatccaaatagattaaaaacttatgcctacacaaaaacctgcgcatggatatatattgctataaacttatgaagtttaaaattaaatttgaaattgctttattcataattgccaaaacttggaagcaacaaagatgtccttcactagatgaatatataagtaaactgatgcatccagacaatagaatattattcagccctaaaaagaaatgaactatcaagccaataaaagacatggaggaaacttaaatgcattttactaagtaagaaataccaattggaaaaagctacagattacatgatttcaactatatgacattctgggaaaggcaaaactatagagccaataaaaagatcagtggttgtcaaaactatagagacaataaaaacatcagtggttgtcaagggttagggttaaataggcagagcacagatttctagggcagtgaaactattctgtatgatcccataatagtgaatatgtatcattatacatttgtcaaaactcatagaatgtacatcaccaacagtgaacccttatgtaaactctagaccttggatgataatgatgtgtccacgtagattgatggattataacaaacgtaccactctggtgctggctggtgattgtgaaggaaattgtacactgtgtgtgaaaaaaagtatatagaaaccttctgtgcccttcatttacttttgctgtgaatctaaaacttctctaaaaaatcaagtttattaattttttaaactaacctaactttatctgaattcaatagcatatccacataggaaaaccaagtaattttcaaagaccatattctatatatcactagtaggacatatattctatggacaaactgcaaataaatataaattttacttagtagtgtattagtagtagtaataatggtattatattctgaaactattttatatatattgtaacataaaacaaataagtaaaacaattaatattattggagccaagattttcactgtgaaagaaaaaataaaaatttaaaattttttaaaggccaagaataaatctgaattataattatcggtatgaattcatgatttgtaaaaatatattttttatcactttcattgaaagggcttaggtgtaatgacacaccaatagcaatgagcacatccaacaaccagatgttggtttctaaacatcattctccactaaaaagaacaagggctccaggtctaggactggagtgcaagttgagcctgggatctcttccctccctctccaaaataaagaaggacacagagtccaagggtcacggtaaaggttcacaggccctggcttgaagggtcagtccgggcaatttataaacattgattcagcgaggatcatgagaaaatgctgaagccactgggtaactttgttgggcatcaggattttcatacaacctgaaactattactcaaggattgcatactaactacgaagggagaaattacttttacaattgagagatataattgatattttcctttctctcttccaggcttttcttttcctaggctgctaactaagctgctatctgtggtaactttacactgtgtcagtctaactaagcaggaaccatgcctcccaaaattcactcccctgcatgtcccagagtagagctggtcaaattaggcatttgtgagcgatctggaaggtggacatgaaacagcatggtcaatgaagtaacgttttctggggcttaaattccactgagttaagggtcattccagtcatctgctcttccatctagttcctactgcttccatttctaggaagtgagatcaaagttctggcttagggaatagaagtacaggattagttttcttatttccccccttaacttccctcatcataccataacttgtcctggaagccatgaagagaaaaataacacctcttatttaaaccccaacccaacccacatgtgggatccaggaattacttaaaggccttatgtgcttggtcaaaaataaagaagcccatttaaatatttgtgacatcagtggagcagacactgatctgacagatggacaagactgtaaactgctatgtcccccaaagttcatgtgttgaaattaattgccatcattacagtatgaagaggtgaggcctttaagaagtgattaggccatgagagctccatcctcatgaatggattaatgcccttatcccaggagcagttagtcatcacaggagctgagtcctgataaaaaccacaggtgtggtctgatttcctctcttcatctcctgcaattgcttctgccttctgcccttccaccatgggacaaccctcaccagatgccagtgctgtgctcttggacaccccagcttccagaactgtgagaaagaagtttcttttctttataaattacccattctgtggtattctgttatagcaacagaaaacagactaagccagtggcatttttagtataatatgccctataagcttagcagaaaaatcactcggcccaccatgttagtgactcatgggtgttaatagtgacaattcaaaactctactggggatacagccaatttctgcttatccacaaatagatgattactttgccaagtatttgcacagcaatctgttccagcttgggctaccacagtaggccccagcttgggtggggtcagccctgtataaaggaatgtggagaggccaggcatggtagctcatgcctgtaaacccagcactttgggaggtggaggcaggtggatcacttgagttcaggagttcaagaccagcctggacaacatggcaaaaccctgtctctacaaaaaatacaaaaattagccagccatggcggcatgtgcctgtagtcccagctgctcgaggggctgagatgagaggattgcttgagcccaggaggaggagatggcactgagtggagattgcaccactgcattccactctgggcagcagaaccagaccctgtctttaaaaaaaaaaaaaaaaaaaaaaaaaggatgtggagtgcaggggtggtggtgattgggagtagaatatagagtgacgattaagggggtattattttcatcccagcataggcctgattatattctaaggtgaaatgttattcatctgtgccactccatatttactgagcatctactgtgattgcaacactgtgtaagccagtagggattcaaaagctataaaatagaatcccaacttcagaaaccttaacttgggtttaagacgcaaaccatagacacaaaaattattgcatcaatacccacctgcaatgataaatgcctgagcgtgctgaacagacaggagagagtttggaagagaaattatccaccatgtaatgcaataggcaaatcacaggactgacggaattctctagaaagaaatgagaaagcagtaggagcaaggaacatagttattaagcatctattaatgatgctactaacaactaccatttggaggcatttactgaatgccgagtgctttacctgtgatttctcattgaagttttgcaaccatcatgtgataaaatgaattattaatctcatattttaaattaacaaagtgaggtttcagataagtaattaccccaagtcacacaatctgtaaataactaagcacaactcataaacaggtttttccgactcagagttgatgttctttctatgtctaggcctgggctctttgctttgtttcctttctcactagaaatgcgtcatatgtgccatgtgtaacccccatggcctctgccttcaaggagcaagtcatgtacgcaagacggtggtgggggacaagaaaatgttgagccaggctgggtgcggtggctcacgcctgtaatcccagcactttgggaggccgaggcgggtggatcacgaggtcaggagatcgagatcatcccggctaacacggtgaaacctcatctctactaaaaatacaaaaaaataaaattagccgggcatggtggcaggcgcctgtagtcccagctactcgggaggctgaggcaggaagaatggcgtgaacccaggaggcggagcgtgcagtgagccgagattgcgccactgcactctagcctggatgacagagcaagactccgtctcaaaaaaaaaaaaaaatgttaagccaaagggtgattgaaagcccagatgtatggtagaggcaaatcatgctgcaggggacgtggtttgcagggatgtctctcaggaaggggttgtgccttaggaagaggccaccattctgaaagcatcacatccctctagctacctccatggaattctaccagtgctcccaggacaaattctggatacaaaaattgcaaactgcaacagcagcccctcaggaggtctttttacctgatgctacgcaacagggcatgctaattatacttaaatagcagaaaaatggctcctaggtggctggatggggtagattacggacataagaggccactagcattcattcccaagcccagtcagcctatctgagtaacggtggtgctcctggggcagagtgtattaccccccgcctgcaatgtgcctaactagtgtcaatattgacagaggagctcatgggagaacagatggatggagtgaaccaaaagacagccacttctcagtcttcattgtgcaggaggagtgatccgggcgaagtcgtgctccactgtcaccttagcaaaccttatcgcctcctcataaacatccaggtaactcccagcaaaaggtgaataagaaatggcaagggttcagtgaagcgtttgtatttctgtctcagcaaaaaacaaatcctctccccatcacttgactgtaattttcttctgtgtaattttctagcaatagttggcaggtttgggaatcactagcacatagtcattagctgtaaaaacgacagttgatgattctgggagtccagagagaagagaactggccaagaaaaaccctggggaatgccaacatctaaggctgtggtgtgaagaaaggaagcccacggatgaggtagcttttcaatgatcgcagatgtacatgaagaggaagaactaggactgaggggtatctcaggagccccaaagtgtcaaaggcagcagaaaaatccaggaagaagagagctaaaaaatatcccctgggtttggtacataggtcatgaatgacattctcatgagagctttggtagaatgatggggttcagaagacagccccacatggaataaggagcaaaagggaggtgaggaagcagaggggaaggagaagagttttcagagatgtttgaataagaaattggagggttgctggcagggaagagtcaggggataattttttttttttttttttgagatagggtctcactttgttgcccaggctggagtgcagtggcacaatcctgactcgctgtagcctctatctccccaggctcaattgatcctcccacctcagcctcccgagtagctgggactacaggtatgcactactacgactggctaatttttgtattttttgcagagctggagttttgccatgtctcccaggctagtctggaactcctgggctcaagcgatccaacgagctcggcctcccaaagtgctgagattacagtcagatgacacctcacatggccgagaataatttattgaggatggtaattatttgagcatgatgagaggctcaacattgagaaatcctaatggaagtgaaggcactgatggaagaacattggtagacattagagggagagcctggaatatgagcccctcaatcaaactcccaaagttttcttgaaaatctgtaaaccactgaaatcattctttgatatccttttttaacctactcaaggacaggaggcccagactggccgtctttgctagctgccactaaacagtttacctgccaccccctacccacccccagagagcatagataagatttattgtgtatacactgcagtttttcctcaacctccacttatttttataaatccttaactaggcttcagagctgattccctcacatatgaggaaacaatttgcatacaaaataattaaccaacatgcaaactaactagatgtttttcagttattttttgacgagagaaaaaatcgcagaagatgcatgagcaaatggcaatgccggacataggatccaaacaggttgggagatgacagcaccagaggcagcatgatgaggttgcctttaagtaggagagggggcgctctgggctctgaccctggaggaagtgcacaaaggatgcatattgattggcaggggaaatgggtgagggggttccaggggcatggggtgagcagagcagggagtcaaagggctgtctgctcagagtgcagaaggccatgtatggggaatggcaaaggtttctaagttgttgaagagaataggaaagggatgtagcaagaagataaaaggttgctggtactgggcatcgaaagacccagttgaggctgagacacaaatggtggcagtgtgcatggcctttcccccaaaacactgctcagctgaccaggtgtgaaaggataggagagtagggggaggtgttttgctgagtgggtacagaggaaggatgggtgcggggaggcaaagatatcaagggtgttgaggggagagtagctcagatgatcacaggacttggactgggaagggaagggagggaggcgaggagggtgcttctgttagccagcgttctcgttagagggagcaggatccgctccagctagtttagcagaaagtgatatagatagctcaaaaaaatccctgagaggtgcaaagaaacagactcttggctgagcttccaggaatgactccccaccacacacggtggagccggcccatcaaaggagctgagcctccgccatcatcacgaagctttcacttggggaccggccaccacagctgcccgcgagagaaccaaacccccaatgccaccaccatcctcctggaaaacagaggcctctgctctgccttccctggagaactcggttttgagtcaaagcctgacgtagaagcattatggttggtgacacctaaatcacacatctgcccctggcagcaagggggcaagggggacctgcgtgtgtgtgtgtgtgtgtgtgtgtttcatctcccttcccccttgcacccctgttgagaggttggtatttacactatgaaaaaccatcaaagtgtggaaagagttcaggaggttttgggcagccagtcactatagcacgggtccccaatccctgggctgtggactggtaccagaccatggcctgttaggaaccaggctgcacagcaggaggtgagtggcaggtgagtaagcattaccacctgagctctgcctcctgtcagatcagcggggggcatcagattctcataggagcatgaaccttattgtgaactgcacatgtgagggatctaggctgtgagctccttaggagaagctaatgcctgatgatctgaggtggaacagtttcatcccgaagtcatgccccttccacctgccattggttcatggaaaaattatcttccaggaaaccagtttctggtgcctggttggggcccactgcactatgggggatagcaaggctgctgcttgggtacgtgctgcttctctgttaaaatatcctgctaggcatatgcaatcctgcaggcacatgacttggcaaggtctgttctttatacgaagagaaacatgctccttctttgggggacattaccctgccccagtgcacagcttgctgagcaaagtgcagcttagatttcagcccctccctgactcctcaactggcaccaccatttgtgacaactccagagctgactgcctgggaggaaacagaaggaaccagggcctctcggcctctcggagtctcttcaaagtcaaacagcttgtgtggtgggaacaagatgacggggagtcagaaggatgggtgctgtggtcacagcatgaagcacggggtgtaagacttctggggggatcctcagcgtgggatagcaagtcctgtgggagggtggagtgcagtggtgataagatcttgaaactgaggaagcagtttgagaggcagatcatctataggggtattaaaaattgagtggaagaaaatgaagaatgaagcctcagtgagagaatcacaaggaaacagtaggtgacaatgagaggaggtagagccaggtggtaatagcctcggacgacttcacacaggggcagagtagccatgggagcaaacaagcgacaaccacaacagtctagctttcctctcctggccccttgctacctggaacatcaatttgttcatttaagcaaatatttatttatttaaaccaataatgaacctccatgtcttagttggctcaggctgccagaacgaaataccatggcttaaacaataggaatttatttttcatagttcttgtaagagtccattctcgcactgctttaaaggaatacctgagactgggtaatttataaaggaaagaggtttaattggctcacagttctgcaggctgtacaggaagcatagcggcttctgcttctggggaggctttaggaagcttccaaccatgctggaaggcaaagcaggagcgacaggtcccacatggagggagcaggagcaagagagagagggaggaggaggtgctgcacacttttaaacaaccagatctgacgagaactccctcactatcccaaagagagtaccaagtggggggggtggtggtgttaaaccattcatgagaacccgcccctatgatctagtcacctcccaccaggcccacctccaacactgggaattgcaattctacatgagatttgggtggggagacagacccaaaccatatcagttctggagtctggaagtcggagatcagggtgtcagccagcatggctggggtctggtgatggccaccttctcactgtgtcctcgcctgaggtcggggcagagagagagagcacatatgagctctctggtgtctcttcttataaggacactaatcccaccatgagggtcctactcttacgacctcatctgaacctaatcacctcctaaagaccccctctccaaacaccatcacattgggcaacccaacttgttatctccagcctgagcctccccccagaactcttggacccctgtgcttcatgctgtgaccacagctcccatccttctgactccccgtcatctcgttcccaccacaaatattctttgactttgaagagacaccgagaggccaagaggccctgggtgcctctgtttcttcccaggcagtcagctctggaattgtcagaaatggtggtgccagctgaggagctcctcagtgggcttcaatgcatgattggggaggggagggacacaactcagtccacagcactccactatctgtgaacaaaaacaaagtctctattctcatgaagcttacttagcttctactagagggaggtggacaataaacaaaaaataaataaatgatatattgaggtaacaaggccataaaaagattaggttggtggggtgaggagcggctgggcattactctgtatagaatgaacatggaagatgaaggagtaagacagtgaatatctgtgtgaagagttttcaagtctgagagcagcaagtgcaaacaccctgaggcaggatcaggttttacctgtggagctgccgaagagagagggaggaggaggaaagtagaatttgtattcgttggagtgtaactggggggccaaccacgtaggcgcattgtaaagacttcagcttttacagctgaaggtggaaagccatggcaggttaaaggggagggaggtgacatgaccgagaaagggaggatgggaaccctgaggtgagaaagtgacacgggggtgctcctcgggagaaaggtgtgttgcagaaaggacaaggaggtggcagcagagtggtttggataggctgagtgtagtggtgtgagggtcccacaggcacagacccctggggtctgcagcagccagaaggggctgccctgtgggagacccattctggggaagggctgaggttccatgtggaagccgccggcagcaagttccacaaggtctcaggatggaagatgagaggggatatggcaaagcctgggtgcctcttagaatgtgcagaaaggctttctggagagtaggcagagggcatgagtctctctggccaagagctgcctcctgctacgttttgagaggaaaaggtagcacagtggaaactaggaaagctgtccagccaggaaaagcccccatccctgagatctgggtcagcctaaaggttctgatgctttggtgagccggaggaggagcttcacaaggaagagtcactggaaggagaaaccagaagcagggagggaagggctgccacctgaggagacgtcctccttcacgactttgctggcctggtcacctgggcctgcaggggaagggcagggaggtgccacctattgtgaaggaaaatcagccacagtgtatgtctaagcaaaagccactctccaaaccctcgtttgcaattttgtcacttctttggcaacaagccccctgcagctgttccacccagagcctctgccaggtgacctggccgtgcccagtgccccacagctgcagcctgctggcggggactccaagtctcccctgctcccagctttcctgactcggggctgttgggcttggagggagctgcattgggggacaggtgagggaggaggccggggcaccagcaggaagctctggctctccttctctttcctggtaaaagcaaggcacaaagcactctttgatctgtgccctctgccagttctggcagggctgcgcttgtcactgttccaaaaaagagcagaaggttacttagctatggatgaataataattgggcatttgtctaacagctactgtactgatgaataattaaaatttttattacaattgaggcaaagagcactctacccatacggatggtctgtcagctctgccagaggaaatgcaggtaattgaagagtgtcctccaagttctgaaataatagtcatgatcatggcaaagatgtctgggttaaaagctgggaaaataggtggacaaccagacccaatcaccaaggcttcttcctttttgggatgtaataaggtaaatcggctaaagctggtcttgggagtgcaaatggctggaacagtcagggaaagctaggagtgaaaaccaggaggaacagaaataaagagaaatagatgaagacttactaggcaaatgcccttatatagtagctgatgaggatgactttgatgagataagaggggacagctggagcataatggaaaaagtcagaaatgagaacacccttgtcaaatggcttggctcctttttggctgtaatcttgtgcaaactcacttaacctgcacaagcttccctttctgcctctataaaatggggatgatactgtttaatcattggctcatcttctgaggattaaacaagataatgttgagaatatttaataattatgaaggcagacagcaaatgcaagtaattataactcagaagtcagaattaaaggtaactgggttcaaacagcttaagagttgggacgggttgagtgaatgaggatacagaaacagtggagaagaaaatcagtggtgttggggttggaccaaatgaaatcaacagtggaatttcactaacttaaatacattgtgcaaggtaaacaaattcctttagttatcaaataccatttgatacttcccgggtgtgttaataagacagtccactcaaaaaatggaccactaaatgataattattttgatgggagagtgtctatggaattcatacacccacgaaattatactgtgaggtgtgaccatgcacaggaaagactattatgcccaaccttttgagagcatgtcatgtgcaagagaacctggacacacccgagagataaatggcaagaatgccctggctccccaaacatataaggaggaggctgtggcttgctcttcccctgctcttcctctgtagtgatcggccatgcagtccatgtgattcgagtttatgatgggaaccaaaaatcttcaatgtaaaacattttttatttgttacttccatccatttttcctgctgtccttaaccctgctttttctcttttttccatcttaccttccttgtaattgattggggttagcatcctcctttttactgcctttattttgaacaactgataccatatttctatttcatagtgattcactttaaattgttgttatttaaatttaacctttaatattattattaaaagttaataatattaaagtaccttgagctaagcactcaaggtacataatcttttttaatccatacaacactcctgtgttcctcattttacacagaataaaaataaggttcaggccaggcacggtggctcatatttataatctcagtgtttttggaagacctaggtgggaggatcacttaaggccaggagttcaaggctagcctgggtaacatagcatgaatccatctctaaaaatatttcaaaattagccaggcgtggtgttgtgcacctgtagtccctgctactcgggagactgaggcaggaggatcattgagcccaggaggtcaaggccactgcaatccagcctcagtgacagagcaaaaccccgtctcaaaaaaaaaaaaaaaaagaaagaaaagagaaactgaggttcagagggatttaagtaactagctcaaggtcccaagacttctaatgcatagagccaggatctgaagcttatttatctcttaagaacaatcaaattcactataataattccttccaggccagacgcggtggctcatgcctgtaatcccagcactttgggaggccaaggtggacggatcacctggggtcaggagtttgagaccagcctggctaacatggtgaaaacctgcctctactaaaaatacaaaattaactgggtgtggtggtgggcacctgtaatcccagctacttgggaggctgaggcaggagaatcacttgaacctgggaggcagaggttgcagtgagccgagatcatgccactgcactccagcctaaacaacagagtgagactctgtctcaaaaaacgaaacaaaacaaaaatccctccatagttcatatggcaggtgcagcattgaccacagtgcagtccatttgccttacaatctactaggagaaataatagcacaacaaattaattcagcaagtatttgttgagtgcatttgttcaaggtatggagaaaccaggtgtaaatgagagatgaagccgcgttcctgggagtgactatgaggtgagcatcacgtgtgtggtgcccagcgctggaggccttgcagggccaatcacgacctctcgggatgtccagagatgctgctaccacccaagcagcccctcccagactggagtgtccaaaaacaagtgaacagcaggcaggctggcatggaaatggacagatgggacttgaaggcaggaacctgggtccagtcctggtctcaccatcactaggcccacgacctctgtaagaccctcgcctgctcagtcagtttcatcgtttgtaaataagaatactgttgagcagagaggtgcaggtgagagattgtccaaaaatgctttgaaaaggatgctaagtaacagttagcttttattatccctatgtttctgctaatcaaacccaggatagttttctacagcaatctgtgagaggctccattatatactgtatttgaatattccaaactactcctttgcaggaaggagtaattctctcacatgctcctgccttgagtgctgagtggagttacagaaggtgaagggccacagaggagaatggctgccaggcatctttccataccagctccttctttccattccttcttgggcatggatttatatagcacattaacaaagagccagggaggaaaggaagaatttctaaaccctttgctagaaatcctcaagtgtttagctacactggagctaccccaggtgctgctaccccaggtcctctctgtgaccctgccccgtctctgctggctgaacaccatatctgaatgactgtgccctgactactgagctccaagggtctggaatgccacttcacatcacaggataacaaggcagcagctgtccacccctctgagcacgcctggacatctggctggtgtctttccaaaggtctccatcctgagcagtcctcaagcaaacactcgaacctcctgtggtgaactcaggccaagactatgtgcttgactgtcggtggcagctgctgagctccagatgacacgggtcatgaagagttgggcttttatctcagttcttcaaacaaccagatcagacgtaacaggtaagcaatcggatttatttgcccagctctaaactcttgtgcctatcagaaagaatcaagccaaaccctgaaaggtcaatttcagatgctgtgtcattatcctcaccgagactttttccttctttctcagttttctcaagttgtttagaggagaactgcagggaattttcccacaatatccaggaacgaacacccagtaacatctccctgaatctgcagtgttatcctaaaattcaagtacatttgtagccgatccgtctgcatctgcacaatatccctaagtatcatggtggggagactgggatattcgtagtctgtaccctcagggagaaggctctcctatcttggtgcctatagaatggcagggagaggagataatgctatgaaaacagtaggaagagcccctgccattcaaagaatcagtctacccttgaaattagacctcatgcaacctcccttcctgatgcaaacctgaaaccacccatggcctcatggacaggaagccacccagcttgatctgtacaaacgtccttagagttggctgcatgaggctgcccctggctctgacacacactcaattatttgggaaaaaaaaaaaactgccttatactgaaatgaaaccagcttctttagcacttccttccattgatccatcagctataatgcacttgcattctatcttcaaaaaatatgggcagccaaaataaaaggaacgggtgtctgctctatctcttctagaccttcctctctgagaggtcctttagcttgttttgtgacactttttaaagtaagacatttagactcatatcttgacaaattataaatggctttctccagttgccccttttcctgccccactcctctgtccttccttacagcataagaccttctagtcattgcagttttcaacataaacagatagcagagaacacccggcaaagaccaacataagtggctgtgcacatcaagaaaaagacagttatgcctgcttctcagtgattattaagggaaaataaaacctacaatgataaacttcacattttgctaatttccagtcatgtgtctccatccaggcattgcccacaaccttaacttctctccaaaagtatctgagccaatgtgtcaacattgctccaaatacaaggtgcaagtatacactactgacatgaaccatcatccaaaacttacctatcttcctctcacagtcacccccacctgccagaacactccctggtggtgggaagagaggtggcaaaaagcagggcattaactaattaacacgtcctttcactcaacacgcttgccttgaagcaattttgttttcacagcatcgggctggaaaaaaaagaccttgaaaaatcatagccaatgcctcatacgttctggtagatctatatttgaaatctccaaagcagtagagaatttttttatggttgatgttgatgatgatgatggtgacatttttgtgtgttgtttgttttacattataagtatttcaacgtaaagagagaagcgtaggcaataataaatatctatgtagccacaatctagctaacacaataatttaccatattttgttccaatttttttgtaaaaaaacaaacaaacaaacaaaaaacaaaaagcattgagatgcatgtacttctgttggagcatccctccctgatcccagtcacttccctccactccagcaggcagccactggcctgaggctaatggtaaccatgccatgaagatctttaaaagatactcactacatatgtacgcataaagaaatggaatttttctttctacataaattctatcatattgtatgttctaatctgcacttgctcttttcacttgacatcctccttttcgatagagccataatgacccatgctgcctaactcatacatcccaatggctagtatttctcccatcttaaaaacaaaaaccttccatgaactttgccaaccatgtactgcccccctctctgttgtactcttcacctttcttgcaatacaactccctgcaagtgttgtccacactcccgatctcctagttttctcccaaactctctcaactcactccagttagacttcactagcaagaaacttgggtatcgtagctaaaaatccttccagcctagaattaggactttgcttcatgagtggccaagagaagcgtcatgtctcagttcccggtggtggtttctgtgtgccctggtagcttgacagcaccttcctcagtttgtctgtcctccacgttagcacatgggaccaagcacctggtgaactggcccaccttggaagctgctggcaattctgctgcctctgccaccacgagactctgaagaatactgtacatacacagatgccccgtctagaagtcctttctgacaagtcctaaggacatgcatgaacatcacattgagcctttccttcccttgcgaacaccatcatgtgggagaaggggaagagccactatccaggtctccccacctgtggatcactctcagcatccactcatctcaccagctgctaggctgacagagatccacagtgtggccaagaagagcttttcactccatccgctccgcccctaaaaacacacctctgttggagttactgtaagggtctgtgaatgaatgtttagatccccattagggaaagagatcagggctcagggatcaaggatacgtggttctcagagctcatcacctgcgagaggatacctttattgttcatccatatgctgatcccagccttgctccctgccccactcatacgaaaagcctaactatagctaactctatttataaatcccatgaatacacaagtcaggcttacggtggttttgtaaaccatttctctccttttatttttatttttttgtcctattcaattactttgcatctcagttgatgccaaaatatcagtggatatgcacacattctaaaaacttcagtgtactgctcagaaaatatggaaaaacagacactctgaatatcctctccaaagctcagcactgagaaacaaactacctgtgcaaagaaaaccgcaaatagatgctgtttgccctgtttgtttatagatgaattttcattttgcattatgcttttcatacgagtgcatcctaaaaagattttcacaatgaactgtgtacatgtagtaaagattgcaaaaagagggaaataataaaggataaaagcaaagactaaactttctaccaaagattttggaggaaaaagcgttggccaggataaataaaatatttttaaatgagtggtgtataattaaatggtcagagaaataactgaaggcaagtaaattgactttcttttcctttttttacatttcttatttctcccttgcataagacaaccaaggtttgagccagctgctgtcttcttcctatctatgggactttgagaagtttatttctgttacctccataagcctcagtctcttcatctgttaaataaaagataattggaggctgaggcaggagaatggcgtgaacccggaaggcggagcttgcagtgagccgagactgcgccactgcactccagcctgggtgacagtgagactccatctcaaaaaaaaaaaaaaaaaacaaaaaaacaaaaaaaaaaaaacacacataattggctgggcatggtggctcatgcctgtaatcccagcactttgggaggctgaggcaggcggttcacaagatcaagagatcgagaccatcctggccaacatggtgaaaccccgtctctactaaaaatacaaaaattagctgggcatggtggtgtgtgcctataatcccagctactcagcaggctgaggcagagaattgcttgattgcttgaacctgggaggcggagactgcagtgagccaagatcgcaccactgcacaccagcctagagatagagtgagactccgtctcaaaaaaaaaaaaaaaaaaaaaaattacaggacccatctctttgagtaactgtattaaatgtgaatgcagcacctagccacattactatgcacatagaaagtattcaataatgtttactgctattaatattaatatttccttcataaatttattaatattcattttctcccatcttaacccttctgggcccctcaatccactggacctgccttcagcctcctgcctctttactgccttcattcgcacttctttgagtcaggttggcaaaccccttcataatccgcccaatctagttttccagcccccaatactctcctgacctataaattcgctttctgcattggccacaatgaactcctcccaggtggcagctctttggatctctctatccttcctttctttgtgctcttttcctggaatgtccttctcttgtcatcctacccaagacaatcagtttctccctctatcgctccttgaattcgcctctgatattgcacttgtgtctgcatattgacaggtttatggaagacacttcctagccatcttgtgagctccttgaaggaactgtgtctttatctgtatagccccacctagcagatgctcaaggcatgcttgtggaatgaataagggaacagatcatttcttctgagctgtttgcagtctggctaagccaattgaaagaatgccttctcttgcaatctacaaattgaaaagcctgtgagaccctcaggacactcaggcaagttttccagcatatgtgacaataccaagccttagtgcatttgcctctcacgtggaggagtctcttctaaaaatgaaacagagatgaagggtgagactcttacagtggttcaactcccctaagatcctcttgtgatttagaagcatcttggaaagaaatccttgacactcgcctcgcccaccctgagctataaggtaaagctctcggtggtaaacgtggctccctggtagggagacttcttttatcctcattgtttctggagggggaagtgttagcacagagactccctgggaaacccgaggatgcctcaccacctcaccataacagcaggaaacccagaaatgattcacagctgaaacctctggcccacatcgacacatcacatcacatggttgtttcaactggaaaccaaacagccatctgggcatgattatctgtatttttgtgaaggtgtaaatacacagtgagtaggaagagtccaataaaacctattataatgttggtggtgggcaccacaaagagagcaccccttaatagacattccctggtccagtgaaagacatactttgtactgagtcccgcgcctgggagaccttccaggaaagtaaatccccaggagagagaggcatttcccagtaggtgctttgctttttggttgttttcttttcttggttgtttactttgttctactttgtttttactacagttctgtcctactggtggcggagtgggactccttcatgatgtggcacagtttccttgagttttaggaagaaacggcccatgtggcagattcagaaacaatgaatcagcacctaaacaaacaggaaggtaagcggccctcccaaggtcacctgggtagtggcagggtgtgaaccagagtccaggtgtcctgaccacccaccaccgcctgtcctcctccctcatacaagatcccttctaggccagcgctgagaataaaggcagcggcatcatggggagggggtgaggacagaagggtcagggaaggcactgggagggagaggcaatcccaacccaactccaacagcctagggtcaaagcccagctccactcctggcagctgtgagactttggtgcatttaatgtccttgagcctctatttcttcacctggaaaatgggattgatgacaatatgcgtccctccaacaactaaatggcacatcaaagctttggttaaaggggttggcacatcgtgaggaccacgtcagctcttaatactccaatgatggcttccctataagtgcagagtcttcttcaagtggtggttagcacgggttttgcctgttcctttaatcatggctgtgaatttgctccggcaccattgttcccaaagtagaatttactggcagcttccccccacccatgacccatctctgcttggaaattttttagtagtagtactggctacttttaaggagaactcattccactgttgcacaatggcagctcttagaaagatccctcttgaattgggataaaatctgatctccctctctataatttctccccactggtcttaacactactgctttgcttcccatacttggagaaatgctcccccagagactctaggtgatgtattggggatcagtaaacccataaaataaataaggcatgttttccttatgaatcaaattaaaatgaagatttcttagggaaacagaatttaagctttgcattgaatggttatgctttttaaaatatgtttcaggctgggcatggtggctcacgcctgtaatcccagcactgggaggccgaggcgggcagatcacctgaggtcaggagttcgaggccagtctggccaacatggcgaaaccccgtctctactaaaaaatacaaaaatgagccgggcttggtggtgggcgccagtaatcccagctactggggaggctgaggcaggtgaatcgcttgaacccaggaggtggaggttgcagtgagccaagatcacgccactgcactccagcccaggcaacagagcgagactctgtctcaaaaaaaaaaaaaattacatttcaatttaagatattttttattaaaacaaacaagcatattttagtatataatataaaattcaaatcatttctttttcagatttggcacaaaaaagtttgcttcgggcaaccattgccagctctatccagacctccaaggagtgagtatctattcacttgcctctgacactgaggatttctagatggagaaggctgagaaatgctactctgttgaacagagctacaaagaacaaatgtaattcctttcccatggggctgcccatcaagttttcctaagatcttacagttggaaagagacttagaagttgtctaaatcgatctcccttctgcagcaatcctaacagatggtcacccagcctccgctggatcaggctcagagcggagaagagaccacatggtaatcattgccattgcatcgctggccagctctgattgttagaatgttcttttcttaagcctagcgccatgcacaggggccctggaatgtggcagacctgaggtggactcttgaaccagccgcttcacctcaccggggctcagtttcctgtaatcccagcactttgggaggccaaggcaggcggatcatctgaggtcggtagttcgagaccagcctggccaacatggcgaaacgccgtctctactaaaaatacaaaaattaaccgggcttggaggcaggcacctgtaatcccagctactcgggaggctgaggcaggaaaatgctgtaaaatggggtgaatggtgttagctatatcacgaggaacaaaaaatggacaaaaagcccttagcattctgcctggcatgttgaaggattcaataaatgttccctatcatcaccattcccttccacagcttccataagctaaaattctagagcctgtttgtaatgcttctgcaacaccatgctttacatatttgaaaacagttaatatactctcccctggctgcacctaaaaagcttttgttcctaagttaaatatgcccccaccttccttgatagaattaacctcgaaacctttcagtgtatgtttttcagaaagctgtttgaaagcatgttaaaaattcttaggaatgaactggagaaatgtcagaagacaaaaagtgccacggagaaaacaaagggagcagaggaaagggatggaaaaggctagaatgcagggggcgggtgcagtttaaaatacaggagtcgagtagctcacattcaaagaactgggctttcttatgaagtttgattggagaccctggcctggaccaaaatggggcactccactccttctcagagttgcaggcagacagatctgccgtgcagcactggccacccaggctgaaaagcaggaagacccgaggaggggcttggcgagggcagcccaagtctgctcactgggtggccagaagcacagcatcatcctgtggcctccacagagagggccaggaagcaggaggtggggcaccaggagaccctgtctttacatcatgctccaacccctaaaaatatggcccaatgcatgtatcaagctctcatccatccaattaattcctccttctcttatagagaagagcaaccaaggcccggcatgatggctcatgcctgtaatcccagcattttgggaggctaaggcaggaagatcacttgagcccaggagtttgagatcagcctgacctacatagcgaaaccctgtctctactaaaaatacaaaaattagccaggcgtggtgacacatatctgtaaccccaggtacttgggaggctgaggcaggagaatcacttgaacccaggaggcggaggttgcagtgagccaagatcatgccactgcactccagcctgggcgacagagggagaccttgtctcaaaaaaaaaaaaaaaaaaaaaaagcagcaaccaagtgttaggaactgaactgtgtccctcagaagttcatatgttgggccaggcactgtggctcatgcctgtaatcccagcactttgggaggccaaggtgggtggatcacctgaggtcgggagttcgagaccatcctgaccaacatggagaaaccccatctctaccaaaaatacaaaattagctggtcgtggtggcgcatgtctgtaatcccagctactcgggaggctgaggtaggagaatcgcttgaacccaggacgcagaggttgcagtgagccgagatcacgccattgactccagcctgggcaacaggagccaaactccatctcaaaaaaaaaaagttagtatgttgaagtcctaaattccagtgtgactgtgttcgaagatagggactttatggagggacttaaggttaaatgaagccatgatgatgggaccctaatgtgatagaaccagggcagatcacttgagcccttgtaagaagaggaaaagacaccagagctcgcttcccacctgccgcagaagaaaggaccaagcgaggaaaccgtcagaaggtgatcatctgcaagccacaggagaaaccagccctgcccacaccgtgaccctggacttccagcctccagaactgtgagaaaatgcatttctgttgtttaagccacccagtgtgctattttgttacaacagcccaaaccaactcaaacacatagcatagcagttcctcaaaaaagtggcaatgttagtggaagtttcttcctttatgggttgaagcagaacatggggagagaagagttccccattgtaggtagattcttaaaataattcaatgctgtaattataacagataagaatgtaggctaaaactaaatttaaacaggaagttacttatttacctctagctatgagttcaatatattatcttattcttggaaaagaaagaaatgaaataaagccttgaacagaggaaacagtaaagaaataaatctgcatggaagaaaatggaaaaagtaaatgaagttggaagttgttaagtaccagtattctttaaattatttacatgaattcagatgtgtaaatcctcattgaaggcaggaacatttgtaaagtatttactggacgccatttgtaaagtcctttactggacgtattcagggggctgaactaagtgtggaagctattaataaaataaaaggtaatattgatcgtgcctttagaaacttctattttagaatgcaaatactaataatacccgctgagaatttagagactatcccttatctccagaggcactagccgccctgcaaaggttagggagctcaacagaagaccaaaggggctaacagcaagatggagcaggagagaacccatttacctggcaggtgtgagaagagtcaaggtgtttctaagcacacagctgaaaatggaaaacaggtgggtgctcctgagcaggggttgggggccagaaacaaagaggggcacccatcagcactgtgttgacaggggggatgaaatttcagagagatcatctgggcccaaacccacagagccgaagggcccggaacacgggtaacgggtgaatgtattcagtcgggcctcctgccgcttgtggacctgctgaggcctttgacgccacataaaccaaaatgagctgaggcttggagactgggtggaagcacttgggaatctcatttgacctgtggattttactgatgggaaaaaggagaagatgctcagagtggtggtcagctgctctgcccacatgggccacccaagagcacccacaacccgcccttacaccatgtccatagaaagggagtggtttttgggttcagaggagaaagatatcacttccttctgggagcaggcgtcgggtagagaaagggatcaggcaggtctcaggttacgcaacaagaaagctcaaaccacctctgtcaaactccctctgattctccttcatcctcctgttccagagcttggtgactaggatgctcctctgtgtcctgtgcaatctcacaggccttgagcttgttccccgggagtaacctctgcagaagcaggaaatgccctctagtcagctcttccgaatgtgagaaatgaaagccttaccaaaggaaagctgaggaaacgtgttcttccttccttcctcccatccttcctccctctcttccttccctccatcttttttttttttttttttttttttttttttgagacagggtcttgctctgtcaccagggctggaaaacagtggcaccatcatggctaactgcagccttgacctcccaggctcaaagaatcctccaacctcagcctcgcaagtagctaggactataggcatgtgccaccacacctagctaattttaaaataaaatattgtacagacacaaggtctcactttgttacccaggctggtcttgaacttctgagcgcaagggatcctcccaccttagcctcccaagtagctgggattacaagtgtgcgccaccatgcctgactaatctttgtatttttagtagagatggggttttgccatgttgcccaggctggtcttgcattcctggccccaagtgatcctcctgcctcggcctcccaaagtgctgggattacaggcatgagccaccacacccagcctccgtcccttctttctttatcttttcttccttccattcttcttctatctttccttctctcccacccttcctcctttcctccctttcttttttcctttcttccatcttttattccttccttcctcactttctccctctattgtttaccatttattgagccggtcagccctttgccaaagatcacagaatgcatataaagatatgttctagatcatgattttgcagtgcttacaaccttagggggaaaaaaaaaacggatgatgagttaaaaattaaaccagccggtgaggggccactagcttcactgaggcaaagaacctcgaagcatgattccatttccacagatggggccgcaggagaatattctgagcccagcacagaggcccagatacactgtgttcttctgggagtccaaatccagccctgagagccctgtgtaggagggggctacggctcagtggaggtttcctctgcctttaaaatagttctgggatgtgattttttgccttgagttactaagctgaaaaaacaagccagaaatacctattttgctcaaaatagcccagtcctcccttatgccaggttctcggaagctgccttgggtgcctctgccccacacaaactcccagcaccgcccaccttggtgactgatgatgtgggcagaggggagcagaatgggaagcagcagcttggcttctctgcctggcctctctgtgctcttttgttttgtgtttttgagacagagcctcactccgtcacccaggctggagtacagtggtgtgatctcaactcactgcaacttctacctcccgggttcaagtgattctcatgcctgagcctcccaagtagctgggattacaggcacgcaccaccacgcctggctaatttttgtatttttaggagagacggggtttcaccatgttggccaggctggtcttgaactcctcacctcaagtgatccgcccgcctcggcctctcaaagtgctgggattacaggcgtgagccaccactccaggccagtgactttttgaattacagttttttccagatcctgaagtctcccattcctgctcagtctctaccctctactcatcatagttcctgttttttgagtactagatactttgtatatattttttaacttgtctttaattattgtcctatttacagatgaaaaaactgaagatcagagaggttgtataacttgcctaaggtcataaaactacttaatgatgaaaatttaaaaccaagtctgtctgactctgtagccatggttctcactgtctggtccctggaccagctgtatcagcacctcctgggaactcatcagagacctaatgagtcagaaatttggggggtcaggtggagccatctgtgtcctggcaagcctcaaggtgattctactggacactcccaaccaagaaccactgttccagcacgttcccttcatctccacgccatgctgcgtctccaacttcctgctctccaaaggcaaaactcaccatgagggaatcatccagaaataaagttgattttcacttctccctgcagatgctcccagggagttaaaggtgactcttcactccagactctaaatttgaccccctttcaggcggccaccccaggttcattatcacaccaatcagccaactgttttgagtagaaatctcctttcccaccctgtaaggaattccaggacaccgtctatgaagagggaaatcataacttggctatttgttcaggacacccctaccctcttccagaccagcagctcattgagacacctgccctcgagataccacttgactactgccgccagtcgacaattattgatcaagtactgtgtcaggtcctctgctaggccgtttgagacatgttatctcaattaatccttacaacaacccaagaggtagacatgattattagcccatttcaaaaacaagaaaactgaggcacagattatttgcctaacttcactagctaataaattactgagatgagacttaaactcagtttgtctcaagaaccccatggtcttatccagtatgccctattgcctgttacgggcctttgtcaaacaagtcttctctcttggtgcactccaggccaactttctgtgttccagcttgagagtcctctttgcagccatgtgaatccagtgtcttcctctcgttaatcctctaggacacctctgcccagctttcttccatccccccgcacctggccatttccctctggagctgtttcctactagctgggctctcacctcccagacacttttccttcctttagaccagcttcatctcctctatgtgctgctcagcatggaataaattctatctttttccaattcccaatttctaaggcaggtttttttttttttttaatcttaccatctctgctttgaccagacacttggtacaacttcaaacattgtcgcctgtggtttggctgcctaacaaggagctcttggcccgcttcgaagccagccttcttgaagcctgccctcacatttagcgcccttaatatagactctgtctaccacagatcagcgtgtactgagaagatagatcggaatcagggaggaggctatttcattgcctggtggtggaaccaatactcagtctggtgatataaactgaaaaatgcaaaagtggggaaggcaaggtgaagagcgaaggcagcttctcagacttggctcgtgagttcatagtaaggcatctccaacaagagtcttgcagcggcctcctggagggtcccttccatccacagtgattggggcacaggctggctcaaccataaaggcaaacaggaaactctgccagcaaaggaaaaaggaagctctcagattcctgttccaagcagccttctgggaaggactttatcttgggggaaagttttactaaaggaaatttgacctgaagttgcaagtttcctttgttgagaaaagcaaataacatgaaaggggagaaaagcaacaagatgaaagattggtcatcacagatgcagatctaatctctgccataatataaactggaagaacctagaaccctgggaggtgagagtggcaggcggtgggggggtgacatgagcagaaacaacagacaagacgaggctgacctcccacaggggcagcgagggccctggctgaccagagaacaggacgaaataaggctttccagggcaggttagagtcctttagtatcaggatgcagtgtttataatctcatgggccatggagaattctgtgctctaagcatctgggaaatgagataatcaaagcatataaataataccagtcaacttttttaaaaaacggtcagtatttttaaacacatattaaaatcttcttgagccctttgcacatattaactaatttaaacctcacaacaaccctatgaaatacataaccaatattatcacttccctttataggagcacagaaaggttaagcaccttgttcaaggtcacacagtttgtaaggctcaaaagcaggatttgaacgcaggccatctggtactaacgtcactcctcttaaccaccatacctgactgcaaagcagtctctaaaattaacgaagtgtgatatggtttggatgctttgtttcctccaaatctcatgctgaaatgtgacctcccatggtggtggaggtggggcccggtggtaaggacagacctcccatgaatggcctggtgccctcctcgtggtaatgagttcttgctctgcggtcacaggcaatctggttgtttcaaagagtgtggcaccttcctagccctctctcatcataggaggtactggctccctcttcaccttcctccataatcgaaagcttcctgaggcctcaccagcagcagatcccagcactatgcttcgcgtacgaactgcagaactgtgagccaaaataaaacctcttttctttataaatcccccaatctcagatattcctttatagcaatgcaaaaacagactaactcaagtgtatcttcttcgctctgttctttaagaagtttggcaactcttgggatggtaaaagaggatagcagaaagaaaactgggttggaatcctaactctatgattgaagaaggggagctgggaccttgaacctcataaggtgattataagtaatgagataatatgcgtctctggcacatagtagatgctcagtaaatcattacactagctcatattcattgatgtttatcaagggctaagtatgtgctaggccctagacataaatctcctgaattgaattcaaccagattagatcgattttacactcctgcttcgtttcagggcatgaggaatgctgagagtcagcctcttggggaagttctcaaaacttcaactcaatttgtgtagtagttgtgcacaattcaggtgaggtgctcatatttcctcttagtcatattttaataaatgaaatatattctatagtttacaatcataaaacaactttctttcttctgttgtcccttcaaaccttctctttaagaggttctttctctgcccctagttgagatttcagacaaggcaggtggctttctgagtcattcccggacacaagggtcattttcagtcgcaggcaccacctcatttgagtattttaagtagccaggctatggtaataatacaaaccctgagcttttatttatattggagagtctcccctcttacagtagggcaagactgcagatggtgattgtttgccagtagccaggcagggctgtgtggccaatgtcctccccatctcccccactgaccctcctcgcacactccccagctgccgcttctgagccattcaggatcagactcagggcagtgggtattagaggaaaagagcagcagtcttacatgatggggacgctcagaacctggtgctggtgcccgctgagcctggcagatatgcaaagctgacccttttgtgaaagacactgcaggttgtcctgggaacctccaactcagttaacataacacaaacgtgaccgtatgtccactttgcagggacagttccagtggaattctgttgcctcagctatctgttagtaggcagctatttgagaaaggattctttctcaaaagtatctccagttaggtgataagttatagagcatcctacttaaaacagatgaggcttctctggaggcacaaagttcagcttccccccagagatctcctcacactggtcaccgcatctgtccaggggggtctatggacagagtcccttcaggaaggctccgggctgtctgcctcccgcatggctcaatctatatccatggataatggatgcctttcctcaccattgtctaggaaactgcagctcacacctactgcaactcactctccctccctctctttttgcagttcttccttctcaggcctatcttactgtcacttctcagtcttcatattcctcccactcccagtagtatacggaagccccctaaagcccctctcacttggcttacagtgaggggaagtgtccctcactcctctgctctacgagccttctaacacgtgcctccaaaggaatctgcactcttggctgttttttgtttttgtttttgttttttttgagacagtgtctcttgttctgtttcccaggctagagtgcagtggcacaatcatagctcactgcagcctcaacctcctgggctcaagcaatcctcccaccaaagcctcccaaatagctgggactaattttttatttatgcagacaagtgtcccactgtgttaccctggctagtcttgaactcctaggtgcaggtgatcctcccaccttagcctcccaaactgctgggattacaggcatgagtggccacgcccagtctcaactctctttaaaggttggaggtgggtgactattagtcttagcaggcctggttttatcatttcttagcatgtcatgaataacagttcctcttcatattctttataatgtggtgtcagttaatacctattgtaatattttctgagtttaaggattctgcccatcacgtgaaggacctcttcaaggagaactacaaagcactgctcaacgaaataaaagaggatacaaacaaatggaagaacattccctgctcctgggtaggaagaatcagtatcgtgaaaatggccatactgcccaaggtaatttatagattcagtgccatccccatcaagctaccaatgactttcttcacagaaccaaaaaagaggctgcattgccaagtcaatcctaagctgaaagaacaaagctggaggcatcacgctacctgacttcaaactatactacaaggctacagtaaccaaaacagcatggtactggtaccaaaacagagatatagaccaatggaacagaacagagccctcagaaataatgccgcatatctacaaccatctgatctttgacaaacctgacaaaaacaagaaatggggaaatgattccccatttaataaatggtgctgggaaaattggctagccatatgtagaaagctgaaactggatcccttccttacaccttatacaaaaattagttcacgatggattaaagacttaaatgttagacttaaaccataaaaaccctagaagaaaacctaggcaataccattcaggacataggcttgggcaaggacttcatgtctaaagcaccaaaagcaatggcaacaaaagccaaaattgacaaatgggatctcattaaactaaagagcttctgcacagcaaaagaaactaccatcagagtgaacaggcaacctacagagtgggagaaaatttttgcaatctactcatctgacaaagggctaatatccagaatctacaatgaactcaaacaaatttacaagaaaaaaacaaacaaccccatcaacaagtgggtgaaggatatgaacagacacttctcaaagaagacatttatgcagccaaaagacacatgaaaaaatgctcatcatcactggccgtcagagaaatgcaaatcaaaaccacaatgagacaccatctcacaccagttagaatggcgatcaataaaaagtcaggaaacaacaggtgctggagagtatgtggagaaataggaacacttgtacactgttggtgggaatgtaaactagttcaaccattgtggaagtcagtgtggcgatccctcagggatctagaactagaaataccatttgacccagccatcccattactgggtatatacccaaaggattataaatcatgctgctataaagacacatacacacgtatgtttatagcggcactattcacaatagcaaagacttggaaccaacccaaatgtccaacaatgatagactggactaagaaaatgtggcacatatacaccatggaatactatgcagccataaaaaatgatgagttcatgtcctttgtagggacatgaagctggaaaccatcattctcagcaaactatcgcaaggacaaaaaacaaaacaccgcatgttctccctcataggtgggaattgaacaatgagaacacatggacacgggaagggaacatcacataccggggcctgttgtggggtggggggaggggggagggatagcattaggagatatacctaatgtaaatgatgagttaatgggtgcagcacaccaacatggcacatgtatacatatgtaactaacctgcacgttgtgcacatgtaccctaaaacttaaagtataattaaaaaaaaaaaaggattctgcccatctccgaaacaacaggaagagtgaattgaatttaatatctaattatgtatgatttaataaagaagaaggggaaaaaaccctcctggtctactaaatcctgaaaagaagatgattcctgtctcagtgcatgacccaaagctacagcagattccagaaatgcaatgttgaccctgcaggaaagtagctgagcaagtgcagccttagccagaatttccctcaccataaagaggggacagatgccaccaggtctgcctcagcccattttcttgaatttcttcttcaagatgccaatggatgtggcatctgaaagtctgattcaggtttatggcactcataccctggaaaaaaagctctgtacaagttttagctcagctttgaacatgtgaacaggaagtctatcctagtattgccccttctatatgggaaaacctggctgcacagctaactaaggtgtgcacagaaacatcagcctcgctggttgcagttctcagtctttcacccaatccaaaaggtagagaaggaagatgctcttctctgtgtcttcagggggttcacggtggtatccttcgaagctgaagggcagaaatccaagaatacgaccacacagaggaatcactgtgttcacctccgtttttcctatgggtacctcgagaagactgctgggcattcccaggccacaggttggctcagtagcttagccaggaacaatctgtgaggcctgacttttagctctgtgtcctgctcactatacaactcaagctctgtggagtagcgtgtctgcagaaacaaagaaaagctttttagagtaatcgcaacttttcccacaagccgtgttttcataggagctttttgctttttttcccagcagcaaggtaaagcaagcaattgaactaacttgttctcagatcaacgagtccattgtgtgcttcagggagcaaaagggtgttttgttgttgttgctttttttctctctttcgatgttggtttggagcagaaattaaacttggccatgggctaagagggaaaagaactggatagacaactctttctttctttggttgggattcagatttctgtaaaaatccataggtttataagtgaaattgttactaaatatgtacctactgatacacatgtcctctttcaaacaccccttcaccctgctcctttcctcctcacagtagcgccagctacactccagaacactaggacaactttaataaggggctaaactatttgtgcctgacattgcttgattatcttgccaggaaaacagatgcaaggtcctgaggtactatctcaaatactggcaaagaaagggagattgaaaagttcatgcttaccatgaacaaaatttcagatcaaaattctacaatgtcctaatctacttacaaattggggaaaggagtggcactattttttccctgtttctcctctgctcacaggtgatttcaacagagtctgttctcagttctggactagtttaactgtaactggagccaaaacagctcaataggaaagaactgtttttttcagcaaatgatgctggaacaactggatagccacatgcaagagaatggagttgggtccctgtgtcagtcagcttgggctgccatcacaaaataccatagactctggggcttaaagcatagactttattgtctaacagttctggaggctggaagtccaaaatcagggggccagcattgtagggttcctggcttgcagatggccgccttctcactatgtgcgcacatggcagagagggagggagagagagaggcagagagagaaagatcttccccttcatacaaagccacagtcctatctgaataggctccacccttgggagctcatctagccataattacctcctaaagaccctatctcctgatacagtcacactgggagttgttaggacttcaacatgtgaatttgggggagatacaattaagtccatagcagtcccatcctcacactacacacaaaaactaagtcaaaatagatcagagacctaactgtgagagcaaaaactgtaacacttttcagaagaaaatataggagtaaatcttcaccaccttgggttagaaaaggccttcttagaaaagataccaaaaatacaaatgagaaaaggaaaaaagatagataaatcagacttctaattaaaaactattgtgctttaatggacaccatcaagaaagtgaaaagacacctcgtacaatgagaaagaatatttgcaaatcatatacccgataagggacttgtatctggaatatacaaagaactcctacaactcaataatagagacaaagaattaaaacataggcaaagaatctgaatagacctttctccaaaaaacatataaaaatggccagtaaacacgtgaagaggtgttcatcattattaactatcagaaaaatgtaactcaaaaccacaatgagatatcacttcatacccactagacaactataatcagaaagaaagataataacaaatgttggtaaaaatgtggagaaattcaaatcttcaatatgccgctggcggaatatgaaatagtacagccactttggaaaacagtctggcaatttcttaaaaggttaaacctaaagttatcatatgaaccagcaattctattcctgggtatatactcaggagaaatgaaaacatatatccacacaaaaacttctatacaatgtttatagcagcattattcataacagccaaagaccaaaagcaatccaaatgtctgtcaactgatgaacagacaaaatggtaaatctatacagtagaatatgatttggccataaaaaggaatgaaatactgatacaagctacaacaaagatgaacctagaaaacactttgctaagtcaaagacgccagtcacaaaagctgcatattgtatgactcaatttctatgatatcagagtaggcaaattatagagacaagaaagtagattagcgagttggcttgcgtagggtggggtgggaagaaacagggagtcactgctaatgggtgcaggatgtcttcggggggtgatgaaaatgtcctaaaaatgattgccatgacggctatatggctctgggaaaatactaaaaacaattgcgttgtacattttaagtgggtgaattgtatggtatgtgaattacaactcatcaatgttgatagatgtgtgtatgcatatatgcacaactgaaaaaataacattccccgagatttgaaacagaagcaaaattaagagaaaacgttgggagttagacccaacatttgggctttcattcacttgggagaaagcgtcaaagtgtctgaaagctagaaaaatggaattaagggaaaatatactcaggaaaaccaagctggagtgtagattgtgttaagctgaacaaaataataaggcactatcttgtttaaagaggacagagcactagcatatgactttgaccatgcttagaatgcttcctgataggaaggaaaaggaacccacacagaccagccacatctccttccctggaagtgaccccatctgtgatacgtgaataacacaactcttcccccaattataaaaataacatatttaagatagtataaaaatgcagagaatggcgcgggcaggaatcatttaatcttgccatgcaaagataagtactaatatttgtcagaggtccctcctcagcacattgttccatatattcaagctcatgcaatacatacacttttgtatctatattttacacttaaaatcaacatttttcattatcatttcaaactctcataaatattactttcaatcagaagaataaaccataatttatttaagaattttcctaagccagggcttttatcttttcaatctttcacttttttttaaatgttgcaaagcaaattttgagcatagaggccaggcatggtgacacatgcctgtaatctctgcactttgggaggctggcagatcgcttgagctcatgcatttgagaccagcctgggcaacacagcgagaccctgtctctactaaaaatagaaaaaaatagtcgggcgtggtggtgcacacctgtggtcccagctacttgggaggctaaggtgaaaggatcccttcagcctgggaggcagaggttacagtgagccaagatcatcccactgcactccagcctgtgtgacagagcaagattctgtctcgaaaaaaaagaaaaaagaaaaaagaaactttcgagcacagatttgtcttatcagattcaattatttcttaacatataaataattttatactaaaaggtgtgaaactagtggtcttcatagtgctaatcaaaaatgttttattaagttggtgcaaaagttattacggtttttgccagtatggcaattacttttgcaccaacctaatactaacttatacattaacagcagtaggtgatacgcccattcactatcaaacatgaggactcctgttccccttccagaaggaatcctaaggaaagaattctcactgcagcatgatttaagatagcaaaaattgaaggaaaaataaatagccatcaatattggaaaagtaaaatagatcctggtgagttatttttcagtgattaaagataagtggtttcaaagaatatgaaaaaaaagattttcagcctaagcaatgtagtgagacctcatctctactaaaaataaaaattaaaaattgtccaggtgtgatggtgcacacctgtagtcccagctacttcggaggctactgggaggatcgcttgagcttgggaggtcgaggctgcagtgagctacaatcgagccgcagcactccagcctgggtgacacaagctgaaaagaaaaaaaaaaattcacaaattctcaaaagaaatggcttgtatgtcaaacaccaaattctttgtgagctcgggtaatataaaaacacaccagcagtgtaggccgagcgcggtggctcactcctgtaatcccagcactttgggaggccgaggcgggcagatcacaaggtcaggacatcgagagtatcctggctaacacggtgaaaccccatctctactaaaaatacaaaaaattagccgggcgtggtggcgggcgcctgtagtcccagctactcaggaggctgaggcaggagaatggcatgaactcaggaggtggagcttgcagtgagccgagatcgcgccactgcactccagcctgggcgacagagtgagactccatctcaaaaaaaaaaaaaaaaaacaaaaacaaaaacaccagcagtgattaagtctgggttgtgggatcatgagtgattttgtttacttatttgcacttttctctatattccaatctgcctatactgacaacttactactttcatagtttttaaaaatctttgattttataaattagcccataagtaaatttgctttcagagactatcctgcatagaaaaggtggaaggtggaaatccacaggtgcaattgaaacatggtcagggggccaggcgcagtgtctcaagcctgtaatccaagcactttgggaggccaaggtgggcggatcacctggggtcaggagttcaagaccagcctggccaacatggcgaaaccccgtctatactaaaaatacaaaaattagccaggtgtgatggtgtgtgcctgtaatcccagctacttggaaggttgaggcaggagaatcacttgaacccatgaaacaaagattgcagtgagccagtgggcgacagagcaaggctccatcagaaagaaagaaagaaaagaaagaaagaaagaaagaaagaaagaaagaaagaaagaaagaaagaaagaaagaaagaaagagagacagagggggggggagggagggagagagagaggaaggaaggaaggaaggaaggaagaaggcaagaaaggcaggcagtgggggatccggagtcttgcagctctggcttctagctccatccatgctgccttctgggtgtgctttgtgtcaaggccttgactggacctcattcctcattgttacagggaaatggcaggctacctgtatgcactaatgatcctgagcccatgttcctcaagagtgccatcccagggctgggctgcagccgtctaatgtgcattaacagttgatgcacatgaggcaagcatccaagaaaggattctacatttcctgccaagcatgggagaaggtgaacctggataatgcttgcacttgggaagctaaacacaatttcagcttcaaggaaacccccagattgcaaaattcttggacagaaagcaaaatatatctaatatttctgccaccatctctgtgagttttctgccaccattctccaccatgacctctgatctgtctagcagcctgctggatttcacacgagcaaagctaaaatgggaggaaagagggcatatgaaaaaaaaattagattgacagaaaacccagagtcaataggacagtctagactccccagcttgtaaactattcataatgactcactcaatagtcaggcattgacaacaagctgaatgactgtggacctagagctacaatattggcaatgttatctttaatttgaagagctcaaataattctgggaggcattaatcaggtaaagaaacacttgccctggatcaaaaattagtgtcagttggttaccaaggatgggaatatggttaaccatattcttttatttcccaggttattgtcataacatctctgtataattttatatacccatatgcacaagtggccagaaatccctttctagccagcagggacccacaaggttctgtttagcagatttatcccaataatctatcctcattaatactgtataagaaaccacctaaaaatccaatggcttaaaacaacaaggatttcgctgggtatggtggctcatgcctgtaatcccagcactttgggaggtcaaggtgggcagatcacctgaggtcagtagttcaagaccagcctgaccaacatggagaaactccatctctactgaaaatacaaattagctgggcatggtggtgcatggctgtagtaccagctactcgggagctgaggcaggagaatcacttgaacctgggaggcagacattgcagtgtgccaagatcacgccattgcactccagcctgggcaacaagagcgaaactctgtctcaaaaacaacaacaacaacaacacaagaatttagtctcacgtctacaggtctgcaagactgactgtggttcagcggctctaggctgagcaaggctacagttcggctgtgcttaacgccaacctgtccttagctccagcctataggttgagctgtaggcaagcgtgttcattctgggcctaagctgagtggataacagctgcctggggaaagttcttcccatcatggtcactgagatacaaaaagatcaagctttaatgcgcaagctcttttcaagcctctgccatcacatctaacaagtattctttttggccaaacccaaagttaaggggcaagaaggacactcctcccaccatgaggtcacagcaagggtgttgatgaataattctctttaagtgctgtgatgaattgagaatagcaattctattatccactgtgatggttaaatctccactggttaaatcttgaccagttcctcttctgactacttctgattttctcctttggcttcccagaccacatgcacaacccctgcaggtgagccagaatgccaagaagtcagcattataaggctaaatagagaaagaacaagttttctttttggaaagttcctcccaacctgcgatgtgtcaagacatcaccattaattggaaggggacacgattatgcaaaataactgagtataaagaacttagagacaaaaggggagtgaggggaggaaggagatgtagcagtttgaactatacgaggtttaaattaatttcaaccaaaacataacaagcaaaggatgttctcctgattatcttatgtttactattatatttcaaaggcaatacatgcttattgtgtgtggggggaatcaatctagtgagtagaaaacacaaccatctaaaaccccatcacccctaattagctgccattcaaatcctttatacatggactactttgggcattggaaatcaaggtgctgctacctaaacagtgtcgtgaaaattttaaggctctgagaaaatgttaaggccatttgaacaccagaaattcttgttctcatctctcaactacaaatgcctaggtgagttctcgcttacagatttttttcaaatttacagtatatgcaatttatttatttatttatttttgcaaaaatggggtcatctattacataccacttttcacattagaacaattttcctcatcaacaaagatatgtctatatcatcattttaaattctgccttatatttcatttataaattaccataaattacttaaccaacaccccattgatggaagtttaggttatttccagtttttcacaattactttctgcatgcataataactcacgtcacttcatatacaaactgaggcatttattttcattttcagatctaagaaatctaagcagtgccttattgacaataaatagaaccacccttgtggtgttaaaatgtgggcagcaagaaaggaaatagtgtggttgggtggagattagtcatttttgaaagagcacgtatgtacattttgcacgttggtgacaattcactcaaaattttaaagaacccagcttaagttttgaatcagcctgaagcactccgaacttcagatgctcatctcagcctcttaagtctgccaaccaagctggagacaaaacaagatctggctccctggtggccgcctgggaatcctgcccttggcgtcatttctggaagggcaaaagaaccctacggactcttgtatcactaggatagaaatgccacccagctcctcagcccatctccatcaccatggcagtggggaggggcctaggcattatcagaatgggtcaggactagctcagagccagtgtcaggctggctgactgtaaactaagccaggctttcaagggaaggcttttgaaggaaataagccaacaaaacagcatcagaaactgaggaaccattccttctccaactctaccccccaagagataccaaggtcacacaggatacagcagttgttgaaattattactgctatggaacagagcttttttggcaccggaagaagtcattctcttctgtcaaccctcttttcctttcccttggattttcaatcctccccatagaaaatcaagaccgcccagcaaagaacatgcttacccaaaagaccacagtgccattcagaaacaagaaattccaactctaccatacatataaccttctatccatcctctgaccttctgacttcataatgtatcttcccaagataaatagatgcatggcatgttaaagcctaggaggaccatggagattgtgtcaatatctttatccttcagtgaatagatggaggcctcagagaggatgagcaacctgcccatggccccacagaattggtggcagagcccaagactgttggcccccaaccacactgtccagacttcaaaagctgatcctcttgccaatgcccccacactagtaacagcctttttgcctgaatgtctctcagtgatgtcatgaagacaaattactgtctagctgtatggttctttagtccttgctgtatgttattgtacctggcaggccctcatggaaactaagctggaaagaaatgaaggagctcaacttggttaaaaccattgacagaacactcatcccccatcttttgctctctagacaaccgcaggtaaatgtgaggcgtttgagagagttaagccttctgtatcagttaagctaaaagaacagtttatttcatacccctaaacttcacaggaatagaacacaagctaccaggcagcaagaacaaaggaacagactagatacatttatttttcagaaattttaagccatggaagaacaaaaaaaaattcttcaaagaaaatttaggggcaggggattgaaatacatgcaaaacttatttttagtgccctttacagatataaagtcatgctgttcgtttaggaacaaaaaaatgcattatgtataacttgtttcactcataaaattaccatgttttgtatattgatatatttagacattgggagatctgaaaaaagcatttttatgatttctttcctggttattttctcgggcaaaagggaggtttttaaaaaaaaaaagtcctcagtggaaaaacttttcagaattttgagaaaatttacagattttagaggatttttacttttcccaaaatgactaagtcatcaggttctcaagtcattgaactctaatgtgttcaaccagcgtcctctacttatcaagataatagcacaaccgggtttagtaatggtgacctattgtggaactttcaaaagtccactgtagaagtcccacaaatttgaaattcactttgccctccaaggtaaatcttttctgttcttcccactgtagcactacttaaagtccatttctagaaatgaactgggagaggtcataagtcatttaatttagaccctacatgagcacaaatcctgtctatacgaggtctacaaatggtcaactatcccttgcttctccacagtcaatggtctaaggcctaattgtcatgctttaccatatacatttatgaatgtgtgatgatctgagccatttctgtcttcctcactagactgcagctgccatcagggcaagaagcaaaccttctctgctgactattttgtcctgaatgtctaccagcaatgggaacagagcagtaaatctatgctcatatcttctgagatagctcttaatattacaatttctctctgtgtattgaacttatattactttccctataacttctatgtactgagtggattctgcccttcttgtccatctagatctttcacaagacagcccttcaaatatatgaaacatgtcatcctccactcttctctcctctaggctaaatatcctgtttcttcagcttctcctctaggctaaatatcctcagctgtcccacatgtggtgtgatttttcagttccttcattaccttggatgcccttctcggaagacatcactgctctggttctataaacccacacggctaacatggaaggggagcagtttctggaatggaaggttattgacatattaagcgatctcccccaaaaatggttccaaagtctgggactaaaccagaaccctgtaatgctctttgccacaaactgattggtgaccaagtcaccttctacagttacataaggcatttagaaagacacaaggaacagatagaggagtgactggtgaccaagactgctagttgtccgctaaaatacattctccccttcctctatggcaatacaacccctaatttttagctggacatgtagctgtctacagtaaaggcagtgtttcccaacctgtcttgtagcttagtgtggccctgtgaaaaagtttttgttaatggaatgagttaggaatggaatgagcagactttgagaaccttccctaagagatggcacacctgcactcttggcacagctgctctatatttcttccattcttttccctcaaatgccagcatctgagactatgagcccaaagtcacacacaaatcaaggagtgtctgtctacaatacttttttttttggtctgaaaaagaaataaactgctatcatgttcaaaccattgttaccctgggtttttgttgttgtttttgttgttgttgctgttgtcacagccaaaactaatcctgatagtctattgctatgtcttcaaccttattcaagtagttttgtaactgaagcagcacatggtgtaattaaacacgaacctgcaagctgataactttcccagtgtcgcctaccctgccaaggatgagggtggcaagcttagggtctggcatcagagagggtgtctgcagctctaactgaaaagagcttccaagagctgactctcttcccagtaaaaaaaaaaaaaagaaaaaaatacgaagagaaaagggaggtgatgccaccatacaagaggaaggcataggtattattttgcaaaagaggatatactatttttcttctcccttcattacatttttgagatttaatggctaatttcaaaattgcttaatgggtcaaaagcacagccctcagatagagtaggacaatccatggaccctagggaacctgcagagacgctcacatggaggtgagtggcaggaacaccaaatggcggagcacgcctgaggccggggaaaggcaagtctagaagactccaccttcacaggtaggggtgacaggcttcccaaagactggaatttcagctcccatgtgccatttcctgatttaatgtcagtcatttgccagttcttgttaaaatcaaacttctattacaaaaaacttagaaatggtcaaagtactaagaagaggcaggttgtagtagctccgtattttcaaatattcccaggcattatgtttctgcttagaatgtagaaagtcacaggagaccatggttctccccttacattaagaacaagctaaataagctactaatcatgttctaaaactcatcacaaagagctgaggacacaaagaaatgaaaacaaagtaaattccagaaagtgataagcactttctaggagaggagagacctatggctgctttcatccctgacagagtaaagaggagaaatcagccagagacagagataaggagaaaccagccaaacttttaataaaagttaattattgcaagcgtgaagctgggcacggtggctcacacttgtaattccagcaacttgggaggccaaggtgggcagatcgctcgagctcaggaattcaagaccagcctgggcaacatggtgaaactccatctctactaaaaatacaaaagttacccgggcgtggtggcaggcacctgtagtctcagctactcaggaggctcaggtgggaagattgcttgagtccgggaggttgaggctgcggtgagctaagattacaccactgcactccagcctggttcacagagccagaacttctctcaaaaaaaagcaagtttattagaaactttttcctagaatgcttctatcttagaccatgacctactattaatagaacaccaagcagctccagcctcagagcaagtcggcacctacccacctcttctccataggccttcactagtgcatgggactactagacagaagtctgaaggcaaagcaagagacctaagagagtgccgcacacaccttgaaacctctggaaaaaatgcattttccatacatatcacttaatcaagtaattttgtgccgtatttcatcatattcaagacactatcaattataagatgcaccattattttaggaccactacatataactaatgtattaaggatagtaatgtgcaacacatgaatgactcacactgtcctctcgttacctagaaatctgagatttgcttatttctcctgccttaggttgcagcgtttcaaatgcaacagtgcagtgtcataatgtaatctttctgaagacatttctgatcccacttaaattcaacatttgtacttctgacaatgaacataacccaagtgaagtgcagacattgtgccaatctttgaagaagctcacacataagtaaacaatgactacgtctgactgctgcctggcccacaatgtttgtgagacaccgctgctggtaagagacttcccaatttcagaggttaatatgagcccaaaatgtgcactttaggatcatcacaatatgaacaaaaaattttcctcccgatcagtactatctatgactcttctgttacttgtgtatttctaaatgtcttatgtatctatagaaaggaccccacatttgcattttcctttctcttctcatcattatgtctattcagagttctctccttcagtggtgatactagatttttttaattgacagataaagttgtatgttatttatcatgtacatgatagtctgatgtacatgtatttcaagctaagcatggtggcttatgcctataatcccagcactttgagaggctgagacaggaatttgcttgaggccaggagtttgagaccagccttggcaacatagtgagaactcatctctacaaaaaattttgaaaattagctgagcatggtggcatgcacctgtagtcccagctactcaggaggctgaggtgggaggattgcttgagcccaggagatcaaggctgcagtgagccatgatagcaccactgcatactccagcctgggcaacagagtgagacccccctccctaaagaaaaaaaaaaaaaaagcatctcctcatattccttacatagtcattacttttgtggtgagaacacctaacatctactctcttagcatcagaggtgatattttaaaataaggaatgaagtgtgtgtagaagatagtcaggagggatatccccaaaatacaaatattacctgtgggtggttatctatgagtggtaggataacgggtgatttttattttcttctcttggtttattatattttataattttccataaaaactattattacttgggtaatttctaaacatttaaaagaaataagcctaatgcaaaatgttttaaaatatcatttgaaaaaagggtaaacaaaatcaaaatacaaatgatagctgggataaatacatacaacacaaaataaccaatatccaactcaatacaatagaacaggcaactcactcaagaaggaatacacagggccaataaatgtatgaaaagttgctcatctgaattaaagcaacaaagagatgccatttttttttcactcctcaggttggcaagaaaacattgtttaaattaaaaacctatagcattctgtgctagcaagcatgagaagaagcaaccactctcacacactgctaatggaatgggaatcgctacatccttttttggaaatccggatggtaacagctactaaaaattgaaaaacacatagcctttaacccagcaaccccacctctaggactctatgctatggaaatgaaagtgctatatatttgtaagtgaatttttagttttagaatagttttaaatttacagacaacttataaaaatagtacagggaatttgcatacaccctacacccagtttttcctacaaacatcttacattagtatggtatatttgtcacaactaatgaaccaatattgatatattattaactaaagtccatattttgtacagatgtccttagttttcacctacatccttttactatttcaggatcccatccaaggtaccacatagtatttgatcatcctgccttctaaggcagcagtccccaacgtttctggcaccaggaaccagtttcttggaagacagtttttccacagacatgaggggcaggcagaggaatgagatggtttccagatgaaatcattccacctcagatcatcaggcattagttagattctcataaggagcccacaacctagatccctcgtatccataaccatagttcacgttagagcttgcctcctatgagaatctagtgccgccactgatctggcaggaggcagagctcgggtgctaatgctctggcccacctcacacctcctgctgtgcggccgggttcctaataggccacagaccagtaccagtccaccgcttgggggttggggaaccctgacctttttttcttttctttcttttttttttttttttttgagacagggtctcactctgtgacccaggctggatggagtgcagtggtgcattcacagctcactacagcctcagcttcctgggctcaagcaatccactcacctgggccacacaaagtcctgggattacaggtgtgggtcaccatgcccagccaggggcccctgttctaaggctcttctacactgtgacagtttctcagactttccttgtttagtgtttatctaattgacaaataataattgtacctattcatggggttcgtagtgatgtcttgatatacataatgtatagtgatcagatcagggtaattagcaaatccatcatctcaaatatttatcacttctttgggctgggaacattaatatcctcctcctatttgaaactatatattaactacagtcatgttacagtggtgtagaacactaaaacttaatccctctatttagctgtaattttgtaacaaatctctccatatcctccccttccccttagccttcccagcctctagcattctctgttctactttttacttctacaagatccatttattttagctttcatgtaagactgagaaatgcagtgtttaactctgttcctggtatatttcacttaacatcatgtcctccagtgccacccatgttaccatgaatgacaggatttcattcatttcaatggctgaatagtattccattatgtatatataccacattttctttatccattcatctaggttgattctatatattggctattgtgaatagtgctgcaataaatatggggctgcagatgtctcttcaatataatgatttcccttcctttggataaatgcccagcagtgggattgctggatcatacggcagttctatttgtagttctttgaggaacctccatactgttttccaaagtaactatgccagtttacattcctaccaactgtggataggagttcccttttctctgcatcctcaccagcatgttatttttttgtctttttgatagtagccatcctaagtgagatgcgacgataccttattgtggttttgatttgcacttccctgatgattagcgatgttgagcattttttcgtatatttgttggcatttgtatgtcttcttttgagaaatatctgtttaggccatttacccatttttcaactgaattgtgtgctcttctgctgttgagaagtttgagctccttgtatattctggatattagtcccccattggatgagtactttgcaaaaattttgtcctattctgtaggctgtcttttcactctgttgattgtttctgttgctgtgcagaggcttagcagtttgatataatcctatttatttattttttggttttattgcctagtaagcactcattttgaatgatatatttacaagaatatttactgcagcattacatctagaggtaaaaactagaaacttcttaaaatccattaaatgaagattaaataaatttgggaacacccatacccttcagataactctaaagctattaaaaagaatgatttagctattttgatctggagagagatccatagcaaaatgttatatgagaaaaacaagtcacatagaactaaatacactttgatcctaatttttcgaagtaaatttatatatttttattagcttgggaaaagtcatgaaaagatgcagaataggtcattgtcattggttaccttagggaaccaggggtagaattgctgaaatgaggccgggcgcggtggctcacgcctgtaatcccagcactttgggaggccgaggtgggtggatcatgaggtcaggagattgagaccaacctggctaacacactgaaaccccgtctctactaaaactacaaaaaattagccgggcgtgatggcaggcacccgtagtcccagctacttgggaggctggggcaggagaatggcgtgaacccggggcacagagcttgcagtgagctgagaattgctgaaatgatgagaacaatgcttaatttttttacttctttcttcatattattttactagtgataaagaacatctgtgaattctccaattttggaaacgtaatttaatagaagatttttttaaactgaagaatatatgccgtgcatcctatctttctggagtggtgcagattcaagatttggtcttcctccaggtgacagaatgaatccatcttctgcttagctgagttaagccaataagtttccttaggcaacctgattctttgcctgatcttttgatatattaacttttttttttttttttttttgagacagagtctcgccctatcacccaggctggaaaacagtggtgtaatcttggctcactgcaacctctgcctcccaggttcaagcgattctcctgcctcagcctccccagtagctgggattacaagcacgtgccaccacacccagctaatttttttgtatttttagtagagataggattttagcattttggccaggctggtctcgaactcctgacctcaggtgatctgcccaccttggcctcccaaagtgctgggattacagatgtgagccaccatgcccggccatgatgtatgaatatttttatgtttttatttcttgaaaaaagttctagtgtagtcattctatcataaggctaactggatacagcatctctaaccaaactatgccatgccatcatacgcaccccaataattccaggaaggatgttgtgtggttaagtgagaaagagttgtcaatccttggcaagaaggggggtaatgttcccaaaagtgaatgtaagatgaagatttgaaagctgttccaatgagatctctttggttccttccattctagcccagtctccttgcttccatcagccaccactgcagttcagtcgggccgaacagctgtacaattgagagggatttaaactgtcccccaagtttgcctcctgcacagcacccagagttctgctgaagatgccaacaggtgccatgcatccatgccagcacaggggtcccttagtgagaaaggccctcacagccacaataaccatccagtggggcttggcaatcaagaacctaattaaaagataacttgtcaagagaaactctagttgaagtctgccccatctttacatgaaaaatatgtggctctgttataacagtggtcaaacctctctcaaaactatgagaccctgggagaaagcagtgacattcttctatttgttcttttcccaagaatagggaacaaaaaattactttcctctgcttttcagtaattaccaaatcaaatggcctgaagctttcttactatctaaccagaaagcagatcccttgccagattcctagttgataaagtcatcaccagacaccgtattgtggctcctaggctttcatctggggacacagattggaagggaaaaaaggcacaggcttttactggtctgggaacggtcagatgataaaatcgggatctgtgatgatccagcaagcatccgctgagaggcaagattatttgaacactaattattcttatgtgcctgatagttcaggaagacccatgagcctatatttctccccatgcttcaactgcacatataaaattgctgtttataccaactctctcctccaggcagctgtttacccaagagagaggcaggactttggagttcatcagcttccaacaaattttcaggaaggagcccggtatattctcttctacccacgtgttccgaacttattacagacaagacagcgggaggatctcagagaacaagagcctaaaactagtgactactgaggttacagatagagtggacaactgacatttgcctccttaacatccattctacctttttttgcctacagctaaagacttttgtttcaggaatatatcagtcagagttgtccaggaaaactgagtgggcacacacacacacactcacacacacacacacagagagagagagagacttattatgggaattagcgcacatgattatgaaactgagaagtcccaccatctgctgtctgcaagctagagaagcaggaaagccaatggtaattcagtctgaggccagaggcctgagaatggtgtggggactgctggtgtaactcctagagtccaaaggactgagaaccaggagctccagtgtccaaaggcgggagaaaacagatgtcccagctcaaggagagagagtgaatttgcccttcctcttcctttttgttttattagaacgctcaaacagatgagatgatgcctgcccacactgatgaagattatcttctttactcagcctactgattcaagcactaatctcttttggagacaccctcccagacacacccagaaataatgtgttgcaagctatctgggcatcccttagctcagtcaagttaacacctaaaatcagccctcacaagaatctacctctccttctctcagtcaaagcgctgcattctctgcaataatccaatagcacccataatatgcaatagcaccaatgagatgaaatggaacttttgctgggacttctggaaaagtgacctgatatgttttcccctgagacttgaaggtgagaagaggtgagcgtggagttgtgcagccaccgtgaccccaaaggaagagactctgagaataaggccaagatgaaggtggctagggtcatgacatacatagaaagggggcatgatggcagcaatgtgaaaacaagcagccccccaggcccagagcatcacatgaataataaattccctttttgcctaagctatttggggtaggactgcttttgtcgagtgctaaagaaagcatcctgtctgataagacatgatatggcaaaaaaaaaaaccacaggtcagaatgagaccagtcacatgttctctgttttccattttaaatttccaagcatgtgctcactattcacatggccaaggaaggtgtcacattatcacctgaggaggggctccttccagtttgtttcagccttctgtaggagacatctattttcagaacaagaaatcctgatgggaggccaatgtattgcttactgtcattttaattttattcttattaatagtaattacgatgcatctctcaatatccagagatcattcagttaatccaacattggcaggaggtgtgttctccacatttgtggagacagttttgctattagtcatccacattctcatatggcccccatggtgacaatggcttatccaaatcctccctagtcctcctgtgtgttttaattaagttggccactctacactagccacttaagaaagatagggttattggggactgtacacagcaaaggaaaagatagagaagccatcactctattctcccactctaggtcccaatgcagcgtattcctccaatctgatatttcttgctcaggatgaatgaagcatgaggatgttcattacctcccttaacgtataacttggcaattgaaagacagtcccctctttttttttttttcttgcctttcttttatgatggaaattgtaaatatcaggttaggtctcaaattatcatccagctaaacaagacatgcaccaaagcactcactctgaggaggacttacaactctcagggtgctcccactcatccagatggctaggaaacagctgatccccctctccatggccatgagatcagaatggggacctgcccttcattggctagtttctttttaagatccaggcagaggagttgagaactaattgttattggctgtgctagtgtattgtcctgagattcctgtgccttcagaagagaatttttggaggggctgaggtcttagaaagtcagacaaaataactgctaaatgaacactgttgatttccaaaccaaatcatacttaatgactatgcctggccaggcacattggctcatacctgtaatcccagtactttagaaggtcgaggtgcgaggattgcttgaggccaggagttcaagattagcctgggcaacctagtgagacccgtctctaattccaaatttttttgaaaaagaagaaaaaatatctacacctggctgggcatgttggctcctgcctgtaatcccagcactttgggaggccgaggcaggaggatcacctgaggtcaggagtttaagaccaggctgtcaacatggtgaaaccccgtctctactagaaatagaaaaattagccaggtgttgtggtgcacgcctgtaatcccagctactcgggaggctgagacatgagaatcacttgaacctgtgaggcaaaggttgcagtgagccgacagcaccactgcactccagtctgggcaacagagggagactgtcgcaaaagttacaaaaaaaaaattatatatatacatacacatatacacctaacatgatcaacgtggcttttccttcacctttctccaagggcaaaagttgagtaacaataacaatattctgtgggaaattcctggtctgatacatccaaatccttccaaattggcacttgtattccttttcctttactttctcaaggtgagataatcacaaacaggatttaaagaaacctcacacatgctggcaaggtggagagtaagaatgcacaacggagccaaggaaagagaacaaggctccttcccacctggccccacgcatcttatcagctttaactccaagagcctgtgttcgcctcttcctcgtgaaggatggggcacctgacgtcttgcagctgaacttacgattacattgcagcagaacacatcaaaagaacaaatccaaataatgacataagggaaaataatcaaagaaattcaagaagtaatccaagaaatcatagccagggagcgtcagtgcacagagaactcagaatcctttccaaaatcaaagaatcattgtgtcagtaaaattcagaagagaaaacacacaaactgcttttcctctgctttcacgcaacaaacaacacggacacaagctgcatgtccttcaattcaatgccaatgctatctatctgaagatagcatcccatcctgttaccggaaaggggccccgatccagaccccaagagagggttcttggagctcgcgcaagaaagaatcgaggcaaatctaaaaagtgaaagcggccgggcgcggtggctcacgcctgtaatcccagcactttgggaggccgaggcgggcggatcacaaggtcagaagatccagaccatcctggctaacacggtgaaaccccatctctactaaaaatacaaaaaattagccgggcgtggtggtgggtgcctgtagtcccagctactccgggcggctgaggcaggagaatggagtgaacccgggaggcggagcttgcagtgagccgagatcgcgccactgcactccaggctggggacagagcgagactccgtctcaaaaaaaaaaggtaaaagaatgaaacaatggctactccataggcagagcagccccaagggctgctggctgcccatttttactgttagttcttgatgatatgctaaacacggggtggattattcatgcctcccctttttagaccatataggataagttcctgacgttgccatggcattcctaaactgccatggctctggcgggagtgtagcagtgaggacaaccagaggtcaatctctttgccatcttggttttggtggtttttggccttttttattgcaacctgttttatgagcaagtcttcatcacctgtgtcttgtggcgacctcctagctcatcctgtgactgagaatgcctaatttactgggaatgcagcccaggaggtctcagccttattttacccagcccctattcaagatggagttgctctagttcaaacacctctgacaatcccacaaaatgagaactcagtcccacagactgtccccccacttcagacaccagtcacaagttcgggtcccccggacttctgacagcttcaagttggagtttccacaaccctctctttgggttccattaacttgctagagcagctcgcagaactcagggaaacctacttacatttgctggttcgttataaaggatattacagaggatacagatgaagagatgcacagggagaagtatgggaagaggcacggagcttccatgccctccccagcatgccaccctccagcaacctccatgtgttcagctatccagaactctccaaaccaggaattttgggtttttatggaagcttaattaggtcggcatgattgattaaaccactggccattggtgatcaacttaaccttcagccactccccctccctgaggttggggcatgggaaggaaagtcccaccctctaatgctaatgctgcctcagtctttgtggtgaccagccttcatcctggagctgccagccaccagtcaatcggtagcatacaaaaagacatcactttaaaaattctaaggatttgggccaggcgtggtggctcacgcctgtaatcccagcactttgggaggccaatgtgggtggatcacgaggtcaagagatcgaaaccattctgaccaacatggtgaaaccctatctctactaaaaatacaaaaattagctgggtgtggtggcacatgcctgtagtcgcagctacttggaaggctgaggcaggagaatcacttgaacctgggacgcagaggttgcagtgagccgagattgcgccactgtactccagcctggtgacctagcaagactccatctcaaaattaaaaaaaataaaaataaaaataaaaattctaaggattttagaagttgtacgccaggaatctggtataaaaccaaatataggccgagtgcagtggcttacgcctgtaatcccagcaagagactagcctgggcaacatggcaaaaccctatctctataaaaaatacaacaattaggcagttgtggtggcatgcgtctgtagtcccaactattcagaaggctgaggtaggagaatcgcttgagcccaggaggtggaggttgcagtgagctgagatcatgccaccgcactctagcctgagcaacagagccagaccctgtctcaaaatatatatatattttttttttcgttataaaggatattatatatatacacatatttcacaatatcacaaaaatatatctattttaaagtactgaacaaaaaaacgttgggaggatcagaactctgatattttctgctttaaactctgaaattagttcaaagattctggtgctatttcttgatgatatccatcgtgtgtgtgtgtgtgtgtgtgtgtgtgtgtgtaaaacacacacagcattggcagtcaagcaaacaggccaaggtagaaattgagaattctgagatctgtctaagtcaacctttattttctttatttggaaaataagaacaaaagtaacaaaaatacagcaaaattatgacaaataaatctgacatttaaaaaatccataacacttttaacatccacatctattctgaattacataactatggaatttcttatgttcttcatattattttgtaagatttatgtactgtctgcccaaaaaagtgtacactattatccccatttttgcagaggtgggagttagatatctagacattgaggatcttagctaaggacaacagctggtaagaggttgcatagttaaaaagtgttaccagaaaggggtctagatccagaccccaagagaatgttcttgtatctcgcacaagaattctaagtgaatccataaagtaaagtgaaagcaagtttattaagaaagtaaaggaatactggctcacgcctataatcccagcactttgggaggccgaggtgggtggatcacctgaggtcaggagtttgagaccagcctggccaacatggtgaaaccccgcctctgctaaaaatacaaaaattagccaggcatggtgacacagtcctgtaatcccagctactcaggaggctgaggcaggagaattgcttgaacttaggaggtggaggttgcagtgagctgagatcgcaccattgcactccagcctgggagtcagagcaagactccatctcaaaaaaaaaagaaagtaaaggaataaaagaatgactactccataggcagagcagcagtgtgggctgcccaactgattatacgtataactatttcttgattatatgctaaacaaggggtggattattcataagttttctggaaaaggggtgggtgattcctagaactgaggctttctcccctttttagaccatatatggcaacttcccgacattgccatggcatgtgtaaatagtcatggcactggtgggagtgtcttttagcatgctaatgcatcataattagtgtataatgagcagtgagggcgaccagagatcactctcatcgccatcttggttttggtggggtttggctggcttctttaccacatcctgtttttatcagcaaggtgtttgtaacctgtgtcttgtgccaacctcctgtctcatcctgtgactaagaatgcctaaccttctgggattgcagcccagtacgtctcagccttattatacccagctcctattcaagatggagtcgttctggtttgaatgcctctgataaatgcaaacccaggtccttctggctccaaaattcaatcaatgttgcctcttttcaaaatatttctatctgcttgggaaaattccagctgatttgccttaggggagaatttaggatcccctattagtcatggtcccctggggaaggaaggcatcttctccaacctggggctgcctgaggagaactcaccagtcaccaccaagacacactgactgcaatgcagccagccccctgacttttggaggaatcctggtgcttcttcccaccttgaatatgctctagcctaactgtctgcctggggcactagtgttcctgcatggcttcccgaccagccaggccttttccatgatttgcttcttttcttctctaaagtatccttgttactttttttgtttttagacagggtcttgctgtattgcacaggctggagtgcagtggctcaatcacagctcactgtagcctcgacctcccaggctgaagtgatcctcctgcctcagcctctcatgtagctgggactacaggcctgcaccatcatgtccagctaatttttgtaggggtttttttgagacagagtctcactctgttgcccaggctggagtacagtggtgctatcttggctcactgcaacctctgcctcccgagttcaagcgatcctcatgcctcagcctcccaagaagctgggactacaggcacatgccaccacacctggctaattttttgtattttttttttttttttttttttaggagagatggggttttaccatgttggccaggctggtctcaaactcctggcctcaagtgatctgccagcctcagccttccaaagtgctaggattacaggcatgagccaccatgcccggccaatttttgtatttttttgtagagatgaggttttgccgtgtcgcccaggctggtcttccttgttattttctaaggagactctaccttgctccagttctggcctgaccatcctcttcttgagtttcccatcctgatactccttttccttgggtgggtttgatgaagttacagcaattccaaccaaattagctgtctctccccttcttcaaatcttcataaagtaacacccccggcttctgcctacccttgcctggtctccccaggccatcctggctccaatgcagcaagctttctctggctcaacctttgtgctgggttaagatcctaatccgacctgttccttccctccttccaatacccaaaaatgttttggatgttttaataaatcaaatgaggagttatgaccttctgattaaagtttaataaatttatcaaagaactatgagaacattcagattaaaaaataatgaaatgtaaaataaaagcaataaagacgaataataaaatcaatagatattattctaacatcaagaagcaaattacaataagaaaattagattataccaaaggcaagaagtgattcattaagagaaagagaagggacacatttcaaatagaaatcatgttaagtaataaattattggattatttgataatccaatgagtgaatcataaaaatacataggaaaagatttaaatttcttgctgatgacaccaaatactggcatcaatgaagctaacataaaattcatactataccacgaaaatgaggacatgaatatcatcagttcaaagagtatttaagatagaaattcacgagaaaatctcaaatgccctgagatcttaacaggtctcctcagaaagaaagtagatagtggtttgccaaaatttgacaaatgctaaatattttcttggcattaccaatcataagttgtgaagctggaaaaaatttttataagctatcaataataaaaataaattttttatcaatcatgcttgataagattgaataatctttccattctctacacagaaaatcacacaaaattgctgtcatagaaaaacataatcaaaaagtatatagctaaaataaagtaaaaaatattttttaaatataggtgtccgatgatttgtatattgttacaatttctgttcttattctaaatactcacttttcataactaattttgcatgcttttacttatagaggcctccaaaaattgtctaaatttcagccctacaaaccctgaactcatcttcaatgggatattgcgtttctccctccccctctcctcacgcaaactcagggctgaccctctttcagacagacagacagtggccagaacagaaccagaacaagataagcggaaatcctacccactgtgttttttaccttaaaagtcagtaggattggctgggcgcagtcgctcaggcctgtaatcccagcactttgggaggccaaggcaggtggatcacgagacaggagagactagacgagaccatcctagctaacacagtgaaaccccgtctctactgaaaatacaaaaaattagccgggcgtggtggcgggctcctgtaatcccagctactcgggaggctgaggcagacaattgcttgaacccagaaggcggaggttgcagtgagctgagatcacgccactgcactccagcctgggcaacagagcaaaactctgtccccatcccaaaaaaaaaaaaaaaaaaaaaaaaaaattagccaggcgtggtggcgggggcctgtggtcccagctactcgggaggctgaggcaggagaatggcgggaacacgggaggcggagcttgcagtgagctgagatcgtgccactgcactccagcctgggcgacagagcgagactccgtctcaaaaaaaaagaaaaaaaaatgtctgtaggattgattcactagcaagtataaagcccatgaaaacgccaggtactcggggactcaagaactgttgtttttaccaaatcatattaactccaaacagacataacagctggatgaacatgttcaactttatcgttgtttttgttttaattattctcttttttgttggtggtggtagggggagagtctcattctgtcacccaggctggagtgcagtagcgcaatcacaactcactgcagcttcaaccttccgggctcaagcaatcctcctacctcaacctcccaactagctggaccacaggtgtgtgccaccacacccagctgactttttaaaaagtatttgtaaagatggggtctcactatattgcccaggctgctctcaacctcctaggctcaagtgatccgcccgccttgacctcccaaagtgctgggactacaggcatgagccaccctgcctagctgttttatttattctgtcttctcaaaagtaaatattttgctgacataaggtagcagagtaaacatggagctctccttccttgcctaatgaagcacaggtatcgaaatggatttacacacctgaggaagacctggcaatcctctcacaccaatttgcaggatggtatttatgtggactgtggtcacatttcttaaaaaaaaaaaaagctctttattgcttgaataagcatttgttgatacattagacaagctaaagccatttccatataactgtttcatatagaagttgttttatttcattatttccttgattcttatttgtccttcatgaggtctcaaagattgtctattatatttaatgaaatgtaaattgcaaagctttacaaaaactgtaattctagaaattatttcattgatgagtttttttgtatcaattcagcagacactggttgagaatcttctcgaagtatgacaggcactgaactgggccctggggaatgcagagatgacattcaggatgctttctgcaaacgtgggtcaaggtgataaatgctgcttcgatgattagatcaaagtgttgaaagaaacagagaggagggagcagttaatcctgcctgctccaatcgggggtgaaaataaaaagtagattcaaagtgtgttttgtggaccccaagggctccagagaggagtctccaggtgtctgctggggaagtggggagctgagaggcagggcttcagatctccaattattgttcacccaaagcacagctgcttccatctgttttatttgttggaaggtggcattagacttctctgacaaaaagccactgcttttgaaaaataattttttagagatgaggcctcactcttgcccaggcagctggagtgcagtggtgcagtaatctcactgcagcctcaacctcctggaatcaagtgatcctcccacctcagcctcccaagtagctgggattacagatgtgagccaccatgcctggctacaatattttgaaactactaaatgagatgtcctttggtgtgagctttaaggttatagaatttatccaaagcgagatgaaatccagtgccttcaactcccttctctatgttaaaattcccaaacctacatctttagccccaactgttctcctagcaccagtatcccccatcctcaatccatccttttctctccacaggacatgttttagaagattgatggctcccattgagtagtggataaaaatccaagctccctgtcatagtctataaaatccctcccaatctggctccaaatgtcttttaccatttattgtcctccacttacccaaagatgctgctgagagacaattctccatgggtctctcatttctgtacttcttgcaaaaagaagcactgaaaaattttattccaggctatcttttcaagaatgtttgtgtagtgaacagctttggaaaatagagacagtgattctctccagagcagagggaaggtttattcgctttctagtaaagatagtatctccctccaggaaaaggttcagtggatttgcttgccgcccattatacaacactggggtttcctacgtgtggggtttcttagctgtaacacaaacccactgggtacagcatccatctgggccgctgcattgctacagtggacttagaaggctagaaacccaatgcaaaaaggaatctcatcctgcttttttgtgtgagtaataaaaatcctttgtctctaactcagggatctcatgcatgcaagtaactgccgcaggctagcttgttagcttacatacaatgagaaatcccagacccttcatcttcacacagttctttttttttttttttttttgagacagggtttcactgttgcccaggctggagggcagtggcgcgatctcagctcgctgcaacccctacctcctgcactcaagtgatcctcccgcctcagcctcccaagtagctgtgactacaggcacgtgccaccatgcccagctaattttttgtattttttggtagagacagggttttgtccttttgcccaggctggtctccaacttctgggcttcaagtgatccacttgcctcggcctcccaaagggctaggattgtaggcatgagccaccacacttggtctccttcacagttcttgacaggtccctgtattggtcaggataaactaagtgtgctgcagtaacagcccccaaatctcagtggtttacaacacaggcaagtttcttgctcattcttcatgtcctttgcaggtcatctggtggccctgcttccatcaccattgtcctcactctagggcacaatctgacaaagcatccactctctggaacattgttaggggtcaaagaaaaagagaatgtggcaaagaatgtgcccacttttaaatctcccacctggaaatgagagacatcctcctgcttactttgattggccacatctaaattcaggtctattgaaaagtgcaaagctaccacatgcacagaaagaaggagagttggaatattgccaaacatccctaatgactcccagaacaacctggtctccatccacaccacatgcttggtctttatacaaacctgctgtgctcgttcatgcctgtgtaattccttcttcccaaaacacgcttcttctccctgaacgtttagcccttcccacacctcttattacatggataacccctactatttttcaacatccaactcaaatattacctcctttttgaaaactttctctgaccatccctcacccagaaaaacacctcacttccctaagattctgtaacactctctatatcaaagtactaacccattgcttcatactgggtcatgaatttgatgcctgccataaatcaagatcccttgagaatggatgataaggagtgggcccatgattttttaacctcctttaggcaaacctagcaccattttgattaaaatatttcagaggttttctactcgattaaaaaacaacaacaacaaatcattgccacaaccttcaaagcgcacacagactgaccatctccagcctcagttggtgccatgatccttctgctttcaagtcccacttcagtctctcaaacctgtataccttctctctccacgtctttgcatctgcctgaaaccccccatcctcccctctccctcacctcattaatctctcctcatccttcagatctgagcagggaagcatcacttccaggggagtgttcctgtcacccacccccccccgccctggtcaaatctccgcttgtctgttctcatagcactgtggacttctgcgtagccctcagcacagcaagtattctgtgggttttgtatgactattttactgtgttctccccacactcaaccttaaactacaagttcacaagggcatgaatcctatccatttttgcccactattggatccctagttcttagtatattgtctgtcacatagtaggactcggtagatatggacgagtaaatgagtgaatgaatgaatataataagatacccaatgtatgtgtcttggattgaagaatttcaagtagagaagacaacagttaaaaaaaaaaaaaggtacaaaagtttgtctggtctgcagggcaaattttttttatgaatgacaagagaagcacaggaggcaaatgaaattttacataaatcttccagtacttcatctcagtgtagaatctgaattatgaaagatcgactcagtagataccacattccaggagtttagagatataatctcattatttttcaacctttgtttctaggtgtaatttacacctaattttttttttttttttttttttgagatggagtcttgctctgtcgcccaggctggagtgcagtggcgcgatctcggctcactgcaagctccgcctcctgcgttcacgccattctcctgcctcagcctcccgagtagctgcgactacaggtgcccgccaccgtgcccggctaattttttttgtatttttagtagagacggggtttcaccgtggtctcgatctcctgacctcgtgatccacccgccttggcctcccaaagtgctgggattacaggcatgagccaccgcgcccggccacacctaatttttaaacaagcggagattcttctaagccagttgccattatcattatctaaaatgtatttgatttactatttacaaagcattttccttatgctatcatattaaacactaaacaacccttataatcaagattaaaagtaggtcataggctctaactctgacatcttcacagaataatttttgatatatttgtgaaataacgagatggcaggtaaggcggaaaagaagcctcccaaacaggcaagaagagtagatggcagaggcacagagaaggagatggagagacatggaaccaaaaggaggggtcacaagaggaagagtatcgtccaaaagtaatgtggggatgggctctgaagcagggaagagggcggcggtctttgaagttggcctcgatggtggtcttttttttttttttttttttttttttttttgagacagagtcttgctctgtcgcccaggctggagtgcagtggcgcgatctcggctcactgcaggctccgtcccccagggggttcacgccattctcctgcctcagccctccgagtagctgggactacaggcgcccgccacctcgcccggctaattttttgtatttttagtagagacggggtttcaccgtgttagccaggatggtctcgatctcctgatctcgtgatccgcccacctcggcctcccaaagtgctgggattacaggcgtgagccaccgcgccctgcccaggcccggctaatttttgtatttttagtagagacggggtttcactatgttggccaggctgttctcaaactcctgacctcaagtgattcaccctcctcagcctcccaaaatgctgggactacaggcgtgagtcaccatgcccagccctcagtggtggtctttgaggttggtatcacagattgtggggagggagacacataatgtgtggggtaggaaattcgtgagaatgtttagaggcagtaagtccctgaggcagggatgacataggagtctatagagacctgaacttgtcaacaggaaaataaaagatatttttaggtgtctgtgtcattaaaggacttctatgggtgggcgtgggccgtaaggtttgactaagagcagtaaaatggggagtaggtaacaggtcacagaaaatggaaatcggtcattactgtttgtttgagattccatcagtgtctggggctggttggtctcattggggaaaggagcatcttgagtgggaaggatgcccaggaaatccaaatagactagcaaagtagccaagaatacagaaatgccctcatcacctcaccaaagcccgtgtcccctcatgttgctctgggagggctgggccacccacaggagacttgcacaggttccggggaccccaagctgctggcagagccccccaccaagtcctgtccagcttctggggctctgtgagcagcatgagccaatcctcctcacacacatgcagagcctcagagaaggagcatcatcctccatcctgctgcccaggacaaaaacctggaaattctccttgacttttctcccactttactccccaagtctaataggctctaggtccttatatctcccaaatccactcacctcttgctatccccataaccactaacatagttctggaacccaccactgaagcgtgttctaacttcctcccgtctgtcttccttcctgtcactgaaaaactgatggcagtccttcctctgcttatacctcttcatcagctcccttccaccattagaataaggcccgaacttcctaacgttgcttcgatatccgcatgagctggcctctggtctcctctccggctctcaccaggcttccctgccagctttgtcccgccataccaaactacttccagtcccatacaagtgcctgtctccctttcactcctggactcagaaaattcatcttgctttctctggaaatcatcttaacctcacgccccttacccttggccccatcaggccagattccctgggttaattcctgttcttgagacttcggctgtgatgtttcctacttcacagctctttcggggctgggtgagcggccctaactttgtgctgccgtagccacttgcatttgccaaaaccagagcatatcatcctctgcatcatagtgggttttttttttcccacttatctgtctctccatctagatctgtggttctctactccctgtaaaataaattagagtcattgttttttaaaaaaaatgctaatgcctattaaacaaaaatctcttgaggtggatctgggcatcagagttttttaagtttcccccaaataattctagtgggcagccagcggtgggcgccactgagccagacggtctttgttgccagtgcacagggaacaatcctcagtgtctgttacacaaatgagtctctgatcattccactttggtctgcagggcaaaaactctacagagagggcatggagaggaagagatgggtcttgaagaagaaacttgcactagggaggacccacacctcccccctgactccagctccctctggtacaaaaccccaaagctgagctgtgggcccagccccacccacatgcaactctgcgctgttggaaaggcttggaagtcaaacagcaatctactcctcttcatggaggcaaggataaattttcttttcaaaacactttaaattttatcacctcttcagaacaagtacatgaatgaataaactgaggctccaagagactgtgagtggccctcgcctcaaatctctagagcaaggcagagcagaaatcaatacgtgactccccaggagcaattggcctcgtcctgggtggcctctgcgcccaccctaactctcctgcctcctagagcaggcagggctcgccccgaaccaccctgcctcctagtgctgacagaggcacatctgcagggtgaagaatctgcaggcaggatgcagagagtgggaggaggaggacaatttcgcacctgagtgatccttttcataaaaatgggatcacgttacttcctactaagagaagggaaatgttatccgagaatgtggggctctcattctcggatatgagaatgtctctgccaacaatgcctggcctgatcttacctaccccacttcaccaggggcactcacagctagaatctgctgagaaccctcaggctctcaatgggtgtgactcatctcttcctctattccctctctgtagaggttttgccctgcagaccaaagtagagcgatcagagactcatttgtgtaacaaacattaagggttgttccctgggcactggcaacaaaggccaacccggctggctctctgagctcaagaaatcacagcatggctcagcggtgctcattgctggctgcccactagaactatttgaagaaacataaaactctgatgcccagacccacctcaagggttttgttttgttttgtttgttttttgagacagagtcttgctctgtcacccaggctggagtgcagtggtgtcatctcagctcactacaacctctgcctcccaggttcaaggactcctcccacctcagcctcccaaatagctaggattacaggcacacaccaccatgcctggctaattttttgtatttttagtagagacaggatttcaccatgttggccaggctagtcttgaactcctgacctcaagtgatctgcccgccttggcctttcagagtgctgggattacaggtgtgagctaccgcacccagccaagagattgtttaatcagcaaaaggctgggcagggcagtggggcctagggcggcacttgctatcagatgtctggagggcagggttggctttggccatagatggacctcggttcaaatcctggctggccataccacttaccagctctagacctagagcaggttaacatcatgaatctaaactacttaccacttaacaaagtgagtgactatctataactgttgccgttgttacaagaaatccacttagtaactgcactgaaagcccctcatccccaaaaggcaagaaatggggaacaaccgggtgactaaggaaaactgcaagtgaaagcagctgtaatttctctcgctgtggtttgcggtgctcaacactcttgcttggctggttgtcttggagggttaatgaggtctctgctgagtgtcctcagcttagcaatgggcagtggggctctgttcacagtctcatcccggccacgtggcctcccgggttcagacaccctaggctgatgctgtggttccatgtgcctgaacacgagcatccgaactcatttccggcctgcctgtccccccatgcaacggctcctgaaaaaggggaaccaaatgctgcccatttcacccccatcaatagctgacaacgcctgggttcctgctctcctgacattcccactcattgtcgtcagtggagcgagcaggcagaggggaagtgagctgcctatcagcccctgcaatcagaaaaagagccgggtgcctttaagacgaaggtggtgggcagccatccatcttccctaaacacacactcgccttgttcttccatttctggctgagtgataaaaacgttaaatgtcatttcctgtatcagtggttaaccactagatgctggatcagagatttaccagaagtgctgaagttatggaaaaaaaataaataaacctgctgttttcaataaccctttcttgcaccctgtgggaactatgtaacctctggggagggggctgcgagggggtcgctggatttgacttgggcaacacacttaggactagatttaccaaatgctttcttatgcttcatataggaagtgaagagagacaaaatgtaaccatcctatacctgtccccaagtgcgcgtgtgtgtgtgtgtgtgtgtgtgtgtgtgtgtgtgtgtgtgtgtgtagaaacgctgggaaaagcaggaggaaaaatcatccacgtgccttctttgcccacctctctcaggatatcttgcagtcattttggttttattgacccagggtttttgcagaggacagttgccctgactattcgattccctcagcttcctgcaacaatcaatgtcctccagtgacaagaaggcttcctgggggaaaacatgctcccaggaaactcctgagaggtggagagcccagctcaatcctttgttgtgtcctcttcttctttcagttgctccattaaattaatcaagagctcagaaaagggaaggcctggcttagcccccaaggagaggtgactggaccgactgcagcctgcccacagctgtactccaagcccagccatgcgcttctgacctgaggtcaactccccacatacagctgccctgggctcctccctgcggcctcccaggcactcccctcagtctggacatataagacttaggagctgcactttgttctagcaattccatttccttcccagtgccagttgggatgtgctgtgcacaccaagtgcccctagctcctcacctacctctgggatcactgacagtcctgctttacctgggaccgaagggattcatggggcggccggggcgggggagggaggacttttgtttctaaaactgggaaagtcccaggcaaaccgaaatgaattggtcacccccgcaacagatacaatggtttgcataggcacttgcacgttctatgtcagaacggtggccaagaaataaaaaataataaatatgatttaaaaaccagaaaataatttttaaaaaatttaataaacataagataatttttttaataaaattaaaaaaaaaaagaaactggccaaacttgagaacagatctagccagggtactgagaactgcagacggcattgcatggtataagagttccctggggagataggacggagcgcatcacagatctcccactgcacctggcgcatacctagaagtcatcctctctcaattcaatagttactagaggagatctgaaatcaaagtcagaatcagaagggaaaagagcatgggaaaacgtacattccactaaatctcttgtaggcctctgaaactgaaacttctttttccttcctcgcgcccttgagtaccaacaccatcagcccccctggtgcccaggacacaaagattcgagagatgcattgctctttactctgcctcgctcccacttcattttattattatacctagacctgatttcctgccacctaggatctctcctctccacttccacttctatgactatccttccgctgtctctgccctcaaagactggcctccatcctctccaacctcaatttcatctgctccctggcatgttagatgctccctactttttcaaattatattcgagaagtgtttattgaatacctagatcagaaggatgccagagaggtcgcacccggatttcatatggcattggacatttctcatggatgcctttttgaatgacaccatctgtaacatcttactgactgagaaaacctcctggacactgccagcaaagctgggcatggcctcccttgcttcctggtgcaaattgccacttagccctcattacattgctatgacgactactttctgtttccatcttgtctaccagctgcgaaccccagtgtcttatttaccctgttttcccaggtcaatcccagaccttgacagatagtggccattaaatacatgtagaaaagaagatggtctggagatgaaagggggaaatattgggtggatgctattatacttcaatgggtctgtagccatttgaacatatacatttcaaaggctattgattatggttggatcaacctggaagatgatccctattagagaaccaaaggtctcagccctgggccctatcctaatgtttttacaaacttcctggataaagattaaaaaggtacccaaaacagatttacagataaaaccaaagctgggaagtatcactaatatgtagaatgctagaattcatgttccaaaattgtcttggcttatgagatggatagaccaaaactaagaaggtaaaaatacacacccaattagtgtaaaggctacactcgtagtagcaccatcactagcacaatgaggaagatgtggttcagcagcagttcgggtgaaaaactcctagcaattcctagtctttgagctagaagagaacgtagaggactatccaatacagagagtctcaagctcttttcaaacaataacattcatcaagtggaatttcatgcagaggccctgtaggtaaaagaatttttttttttttggggatgaagtcttgttctgtcgcccaggctggagtgcagtggcatgatctcagctcactgcaacttctgcctcccaggttcaagcgattctcatgtctcagtctccccagtagctgggattacaggtgcatgccaccatgcctggccaatttttgtatttttagtagagacggggtttcaccatgttggccgggctggtctccagctggctggtctcgagctcctgaccttgtgatccgcctgcttcggcctcccaaagtgctgggattacaggcatgagccaccgtggccagccggtaaaagaaattttttaaaggtgctgctctggttaggagtaagggaaaggggtctaacaagtcagcctccaaccaattcgcccctccctgctatcttatgaagacccctgaggcaccctcccaaactcctggggctcttctgagtgaacactgtttgaaaacacagacctgagtcaatccccttgctctacacagctgcccatctggtgagtgtcagaattcccccgaaccctctaatccctcagccggctttattttgtgttgcatttcatttttctttatagtttttggccctccatggcactgtatgctgcacttcactctgtgcaccgcctggctgtctcactggagtcctgctgtcttttttccaccagtgcatccctgctgcacggaacacagtgggaggaagatttaatgggaaaggaatgaatgaactggaaaggaacccaggtatcttgacacccacccaacttgccctcccagtagtgtaactgtccccaacaacaaccaaagccaagatcacattaggctgcattaggagatcaaatgggcccaccgtactcatcatggttcaagccttgtctggaatagtgtgttagattctagcagctacattaaaggaaacaaatgtggcagaagtggcatataaataatattattgagggatgactttgtgccagacatactgtacattcatctcatctagtcatgacaattatgctgtaaagtaattattatcctccttttgaatctggggaaacagaggctcagcacgtttcagtaatttctccaaaggcctaggattcaaacccctggcaaagcttgggttctatccaccacaccgaggtgtctcttggaggggcccccaaaagggcaagaagagtatggaggatctagaaatcatgaccagtgaggccagatatggtggctcatgcttgtaatcccagcactctgggaggccaaggtgcaaggatccctttgagcccaagagtttgagaccaacctaagcaacataggaagactctgtctctgcaaaaaaaaattttaattcgccaggtgtggtggcatgtgcctgtagttccagctcttcaggaggctgaggtgggaggatcgcttgagctcaagagttggaggctgcagtgagccatgatcatgccactgcactccagcctgggtgacagagcaagatcatgtctcaaaaaaaaaaaaaagagagcgagagaaagaaatcacgacaaatgagacatttagcctggagagaatcagacatacatgacaggctgggtggggagtgaggagaccatgacagcagtcactgaagaaagaagagcactttttgaggagggaaagtgctgagactcaaggccccttgtcaggtgaggtgtagaggagattcccagatcggtaggaaagtggcccaagaaactctgggctgtgttttggccttgctgcacatttgtgggtggagacaattccctgtgcccaccacacacccacaccatcctctatcaccacatcttctgtgccacaggctctcccgagctgtctgcctgtttattttcctgtgacgagagggaccaagcagcagcagcagcagcggcatcataataactgcccacaagttgtagttggaataattttcagaatggctcgagctctatggttaaagaaacgactgctggtggagtgtagtaaacaggccccagccacagaacacagcaagtgggcacaggacatgggagtccaagagcaaggcccgggtccaggacgcagcagggctgggaggagctgaccacaggaccccactccccgcagggcagcacttcatccagggcccttccctggctgcgtaactgcccagattcgtgtctcctgatctgttgtaacacacaaaggcatagagcagaacaggaaactcaggaaaaaaaaaatggtcttttccctcttgagtgtctgctctgataaagacccttcccagaggctggtccttgtctcaagcccactagaaattctgccatgagtgtgagttttagagacactggggaaaatagaatacacaccagcagccatctcgctcttggttgatcaaaatagaatcataatagttctctcttccctgtccagaatcaccttcttcccatttttctgtgccccctgccgagaaaccaaccaagacaaggggtcagaagaagcactgagaaaccactggagaattcacaaggatagtcaaggttgacagggtccatggaaagacccctaaaagtaccctgtctagaatgtgagagctgcaagggcctgcagagtcatctagtctgactgtaaatatattcaactgcgggccatatgcggtctccgtcacaaccactcaacaaaagcagccatagacaatacataatacaatggccatggctgtgttctaatcaaacttgacttatggttatcaaaatgtgaatttcatataattttcatacattatgaaaacattactctccttctcaattatttaaaaaggtaaaaggcattctcagtccactggccggacgaaaacaggcagtgggctcaatttagcgtgtgggccacagtttgtcaattcctgatctagtccaagcccttcctgagacagaggagaaatctgactcctaggaaaggcagcgactggtggttcagtgtaggattcccatccacacacagtattccattcttgtgctgggctcttgcccatgcaaagtgatatttcagctgccctcatttcccttgggcatgatgtgcctgtactgtgagggcagcagcctggtctaagccctgccaactgtaacatctggaatggaacttcaggacttgacagactctgactctgtcccatttctgcactcactcccaggatgaccttgggcaggtccatcaccctctcttgatcccatcagaaactgcagacatgggaaccacacgggtcatctctgagagtgggtcttcagtcattgtcctgccttcccctctcctgggatcagtaccagcaggcccctggcatcttctccagcagccatctctcggagcaaccagttctgaggccaccaaagtatagtgacttctgggcaggaaaactagggatggaagcaaatgagttgtctgttttcatgcagatgaagtcgtgggaggacgtatgattcatgtgttgagtgctttttcaatagcatgtttctatcatttctggaagacagcaagttagtttccccccgaggtggtgggagaggatgttgtttgtggttttcccttttagaggggagttacatttgtttttgttgttgctttgttggtttatcaatttttttgttttgctgtgttgtgatttgtgttcatgaggagttggagatggcggttgggagagaaagttttggaggggtaggaggaagcagagcctatgtacaatgtctacaggggctgatcacacaaacaaggtcaaggtggttcaaagtcatagtcagatgcctgggggcctgccaaacaccacatgccttggttaggaaattagtgacagtttgacatctgggtcttgtgtgattgccatccaaagataaggaagggaaagaggagagtcctggcatggagttccaagcaggctcagagccccgggcctgcctttccatcacattaaagaatgtggctgctgtgccctggagcggttccctagtcacaccaggtgatgggagccaggagcatgggatagaaggagcctggtcactgtccagcccagagtatcgctcagtgttggctcccctgccagtctcttccagggtatctgacacccaaacaggttggtgcctggaattagggtattaggccactggaccttcttggggagctctagggggtctctgggaacttgaataagagctgctccaaaaacttctctgaatcctgcacccctcccttagcaagcagtatgctggtaaaaggttaacaaccaagtatctggcgaaaaaatgccctgattcatagcatttgctaactcccatggtgtaaatactctcctaccttggccaatttcaagtggccagtgttatgttaactagatcacaaaaatcctgaaaattaacattgagttttctcaagccagaatgagcccctcttctacaccacagccctgagccctctggaaccaaaggagaactcagaaatcaggaatcatttggtcccaggctttccaggtgccagaatgaaccacgagctcccggtgaagccgcaagttttatgagtctgcagcacctcacagtggagggaccctggtgggggcaggaggaaggaacggaagttggctaattagagaccctaaaaagcccccagagaatgcaagtaagagagaaaaagggattgggagtaaatgctaggaactcaagcattcaaacctctgtgtggtccacaaaacaaaaactgtgaggtatttaaccacctctccttcttatttcctgagtgtgttcctgtctcagtccatcattttccagagaaaatcttcctaaaggatgttaggaagcagctgtccatcccatatccctgagaaggggtgccctgcccctgcaacgtactaaacacaaggtggtggctgacatggaggaatctgtcccctacacacataggaccactctgccagccaggcccaggtagcacctgggatgaactcccctcaccctgctccctggtcctctccctactaagtcccatctaacacactcctgcttggctaagggaggaaaatcgcacctcctccaactcctctgatgtccctacagtccatccaaactcacttacaagagtaaggattcttggatcgacacaggccccttcccttgggcagtttcggcttagcaggcgttctgggaagacagccaagcagtaactcacttatgaaagacttcattctgtgcctgctctcctcacccaacagctgacacacatggacccccctcgctgccattttagtggccctggctggtcagaacctactcacctggcccgagaggcccacagtgtcctgcctccactccctttcctagagccctggattccattcctacctctgccgctaattgcctcgaacactcatttaatctcttctgactatggtttccttatctggaacacacaaatggttggacttcaataatattccatacaagttttatagaaaaataagatttgtttggaactttaaagcgatcaagtattttcacttaattattacaaaaagtatgtgatataagtagtaatattagataatattaggaactgaggctcagagagcctgggaaatgcattccagattacctggataagaggtagcccacccaaactcgatctcattcctctgacagccaacactgcacacagacacctgagcaagttgctacaactgggatcccacagcagagtcccacagctgttcctcagttagcattcatgtccctttgattcaccagtttaacacaataaattccgttcattctaggctgagagactaacgtgaatacgctcaatgtccaggagaaaactagggtctgtcctgagcaaagttggtgagtgagcgccatttaccttccctgagccccccaaccttctgtgcacaattctatgtcctatacctttgcctttgcaatctaacattcttccttgtctttttttttttttttttttttttttctgttagagtcagggtctcttgttccgtcaccaaggctggagtgcagtggcacaatcatggcttactgcagcctcatactcctgggctcaagcgatcctcttgcctcagcctcccaagttgaggactacaggcatgagccactgcatctggcacctttcttgtcttaatactgttctagtccatccaaaacaacaacaacaacagcaacaacatttcaatcaaagaaacatacaatactgcctccccacctcctgcaataaaacaagtgctgacacccaccttccacaaaagaggagaaagggaccctttcacccgacatgagggtttctttcacttttttctttctttttttttttttttggtggggtgacaggctctcactctgtcgcccaggctggagtgcagtggtaaaatcacagctcactgtagcctcaaccttctgggtcaagcgatcctccctgagcctcggcctcctgagtagccaggactgcaggagcacaccaccaccattcattagcggccctgcctgactaatttttttattttttatagagatatggtctcattatgttgctcaggctgaactcaaactcctggattcaagcaatccactcgcctcagcctcccaaagtgctgggattataggtatgagtcaccgcgcctggcctatttcacatagttctcgcccttagtcctatgctgccctgtctaccttggggcagaatttttccatctgccccaagcgctgtattcttataaccatcctgtctctttatttattgtatgtcctggatgccagcgaggcccccctctacacacacactcaagaaggttaaggcaagaggaagaaacaaaaagagggacaatttactgccctttacatagcactttgtcataacaatacccttccaaagccctcactgaacggtgagaacaatccaatgaagtaggttttgttatgtctgtttttacagaaaaggacactgaggctcaaagactttgtaggtcattcacctcgtaagtagaagagccagaatgggaatccatgttcatctgactccaaaggcaatggaatggccaggcccctccctaggaaattatctaataggactcttcaaggatatttgccttttaacaggagtgtcttgaagccagggtctcacaaaccaggcaacagagctcgaagcggtcatacccaatacctgctgatgcaatcatatggacccaatgggtttgaagcggggtgatctcttactgcaccaattaaatagtcatcagttctaccaaccataaaaccaaccataaatgtaaacaaagaattcctgatcccacgggtctggacactaaaagtgtccccaaacttagagaagttctggaaaagaacatatcaaaattttggctttgctccagatgctataggaaactgtacgtcacaagagttctccattattgcccagacaatggaaatagcaaccacgcagcaccttctaaaatcccttgcagtctgagacgtgtggtggagaccctggttttcattcattatgcatgaacccaaagtacagacttgcagaccttcctagaaatgagtagtaagttcagaccatcagaatattcagaaacctgatgtatttcagagactttagcagtaaaaaggggtcagaacactagaatagctgtctggtgaaatctaggagctttgttcataaagacattatgattcagttaatgagatttggcaaggtattaaccatcttggtagaccaataatggttggctgctatggagtttagactgggaaatagaaaactgaactgttatcagaaaagtttgagatactttcctatactttttgtataagatgaaagcctgcaaaagatgaggctcaaaagatatggagacaacctaaatgtccatcaatggatgaatggataaagaaaatgtaaaatatatatatatatatatatatatatacacacacacacacacatatatacaatggagtattattcagcgttaaagggccgggggcaggatcctgtcatttgcaacatggatgaacctggaggacattatgctaagtgaaataagcctgattcagaaagacaaatactgcatgatctgacttatgcaaaaaatctaaaataatcaaactcacagaagcagagagcagaacagtggttgccagggggtaatagggagggaaaatggggagatgttggtcaaaaggtaaaaagttttagttatgcaagatgaataatttctggaggtctatcgtacagcacggtgactatagttaataatactgtattgtacacttgaaacttgctaagaggtaagatcttaagtactcccatcacaaaataagagaaaatgactactatgtgaggtgatagagatgttaatagcttgactgtgtgatcatttaatcatgtatacatatctcaaaacatcggttgtacaccttaactacatacaatttctatttgtcaattatactccaataagagttgggggaaatggaaaaagatgagcttccataaatcatctgagcatatcaggaagtgaaacatgcaggtgttgagaataaaaacataattatctgctgggcgaggtggctcacgtcttgaatcctagcactttgggaggccgaggcaggtagatcacctgaggttaggagtttgagaccatcctgggcaacatggtgaaaccctgtctctactaaaaatacaaaaattagccgggcgtggtggcatgtgcctgtagtcccagctacttgggaggctgaggcaggagaatcgcttgaacctgggaggtggatgttgcagtgagccaagattacaccactgcactccagcctgggcgacagagcgagacagagagaaaaataatactaataaaataaaattaataataaaataaaaccgtaattacctagtgtgtggcctttcctggagaaaggctctgcacactgcccaagagcaggccttaatgccatgagctgaaccagcggggctggactcaagggttcaagggtgcggagtgagaggagaaacaacaaagggaaactggggacagctgctctggtgaactcaaggaagccacctgagatggggagggaaggaaaagggggttagtagagcttcagggaaacgcagaggagaagactgatttcacccggtgatagaaacaaaggaaaagggaaaacagaagccacgttgtggtggtcagtgctgcaagaaggactctaggagagatagcttctaatgagaagaggaaccggggccagcaagactggctccaggaggaaagttctgtgaggtccatgaaagaggaagtagggaggaatcgctgttgaaattctcattgtgaatggatggatcccaagtcctggaggaatgggcagaaaacagaaagcaaagaaaaagaaatgtaaaagaaggcttcaaagcctaattaaagtcatataaagaggataaagagtaattcaaagaagcaatgtgagaaaagaaacactaaaaagaagacaagaggaccctagggaaggaaaaactgggtgtacatttgtgtaagaaatctaggtattacctgtttgaagcagtttattcaccaggaactaggaaaggaactggctctgtggatttccttaccagacaattttcagagtgagatttttgtttacagtttattataagaaccttccaaagacttatgggatctggatctgatgatacataacaatgcttatgacctaaaaaagcaaaacgattcacttcatggaaatgcatgttccccgaaagaaatccatagagccccctaatgaaattttcaagagaaaagctatgtacaaacatatgatccgcttcctaaacgccacaagaaaggtacaggtggaaggagtagaggaagatttccacggattcttgagaaaaaaatgaaatgggaaatctaagacgagtgcccaacaaaccaaataatgcaggtttcaagagcacagaactgaatggggtttatttaaacacacataccagctgctgccacatggctaccaaatggaaactgagccaggagggtggcccagtttctaggtacaagaaagaacagaggttgtgacgcaacaggaatgatgtttccatttgtattttatgaagttaacagccaaaattcacctctgaaaacctaagtttggcagtggtataaagaagggaggaaattcctgatggaacaagaagggattaaaaacaaaagaggggagatcagcgggagggcaggcctctgatcttccctggctggcagtggtggacaagtaggaaaatgatgtgagcagatgctcaaggaaagtggccctgaaatcaaaggctttgaagagataagcagagtccctcaagcaaagcaataaacagagaaaccaggatgaatacattggaatcgaaatgatgaaatgtaaagtaccacagagaggtttctagaaaagcatccagagatggaaatggggaaaagagaaagatacagcagaaataaattgcatacgagattctagtgtgtgctagaaatgtagggaggaaagagtgatgataaaattaaaagaaagaagtggatagatcttagtggcatgattgaaatggataatgaaagggatctttatgaaactgttgccaggagaaggaaagatatagaaagcgaaaaaaaggctgtaggttaattccagtatgacaagaataacaaagaaatgcatgaattctcagccaacagcccgtatcaagagacaagcatgttctggctgtgtgtgaagggcacaccatgccaggggctctccctgccaacgcctgcagacttttgctcctcacctggacctcacagcgcacctgttttcaatgacacatggcggaaaagggtcaaaagatgaataaggccaggcgcagtggctcacgcctgtaatcccaacactttgggaggccaaggcgagtgaatcacttgtggccagaagtttgagaccagcctggccaaaatagcaaaaccctgtctctgctaaagatacacaaaattagccaggtatcgtggcacacacctgtataataccagctactgaggctgaggcacgagaatcacttgaacctgggaggcagaggttgcagtgagctgagatcgcaccactgcactccagcctgggtgaaagaagtgagactctgtctcaaaaaaaaaaaaaaaaaggataaaatgatactcatttcttccttggtcccatcgacaaacatttatcaagagatgtctacgtgccaagcacggtgcttgatactgagaaaatacaataattgataagcaacatagatattctgacaaaaatggaagcaaaaaggggaggaggtctaaaatatagaattttccagataagacagagcaaagttcaaagccgtgaaaatgagagtcaatgtgaaatatgacagaaatggggacaccaaggtggacacaagatgaccgtatattctcctcgaaggggaacaagataggaaaggaaagtgggaaacaaaaagtggaagtaacgtcaagagcccctaatggggctctaataggctctaacctgagtcctagcccttactcagctggttcccagatgatcttgagcaaagtgcttctgtgctctgagcctcagttcccttaactataaaataaactaatgatgtctggtctaacttgtggttgtcaccacgacacagtaaggggtattggttgtgccctcctgccataaacaacaataaaactggacgaattatatgaaactgttttcaggtgcaacgctacagatggtgcagggatgtgatgcttgagagaagaaacacaagaggtgaaacccacatttactctggcctcctgcctggggctttccaaccacagcacgcggaagtggagcccaaactgaggatggaggaaagagaccgaaggttagggctgctgcagggattgagtgtgtgggacagggtacgagagaggcaggagctgcacagagcagaaatccaaaaatctgcagaggagaccacctgaatctagttgaaaacaaaactgcacatgtacagggtaatgttttcacaaagcctagtagagaataggtagcaggggcaaggtgcagtagctcatgcctgtaatcccagcatcttaggagaggctgaggcaagaggatcgcttgagcccaggagttcaaaaccagcctgggcaatatagcaagacctcatctctacaaaaaattttaaaaattagctaggtgtggtggcatgcacctatagttccagctacttgggaggctgtggcaggaggatcccttgagcccaggagcttcaggctacagtgagctaagattgtgctgctgcactccagcctgggtgacagagtgagaccctgtttcttaaaaaaagaaaaaaaagagagagagagagagaataggtagtaggagctgtgcactgaacagagattccagaggtcacatggtgggaagagacactgtgttctcagtgtccatggtggaaagagcttgatgaacagcctgggctttcaacagaggcccgggaaaggccacacctgtggagctgggccaccccagcactagagagaggctgcactggacccatcaaaacaaagccaaattacaacactcaataatggatccaagcggatccaccaataaattaaccacctgccaaaacaaatgcaatgatccttacaggaagataataaaaccataatgtttgacatgtaataaaaaattactcaatgtgtaacaaggaggaaacaagtagtatagaaagcagccaatagaaagaatcccagaggtgatacagatggaattagcaaagaaaaactttaaaatgactaaatatattgaagaatttaaagggaaaaagtggacataaggaatgaaaaacagttactcattggaaaatagacattatgaaaagaaacaagatgaaaatcatgggactcaaaaatctacaataactgcctgggcacggtggctcacacctgtaatcccaacactttgggaggcccagccgggcagatcattgaggccaggagttcaagaccagcctggccaacatggtgaaactgtgtctctactgaaaatcaagaaaaaaaaaaaagaactgggcgtggtggtggaagcccgtaatcccagctactagggaggctgaggcaggagaatcgtttgaatccgggaggcagaggttgcagtgagccgagattgcaccactgcactccagcctgggcagcagagcaagattctgtctaaaaaatatgtttatatatgtatctaaaataactgaaataagtcacaagatgggcttaacagaagattagacactgcaaaagaaaagattagtagacatgaagacagaataataaaaattatccaagctgatgcacacagagcaaaaaaggactagaataaaagaatagagcttgagttacacatatgggatattattaaccagtctaacagatacataactgtagtctcagtaggaaagcaaagaggaattggggcagaagaaatatttcaaaaaataatgacctcctaatgtgacaaaaaagtaccaatccactgatccaagaatctcaatgtatcttaaacaagataaacacaaagaaaaccacatttaagcacatcatagccaaacgttgtaaaacaatgatgaagaaaagatctcaaaagaattcaggggacaaaaaaaaaaatcccacctgactacagtggtgcaataatgagaattatcactgacatctcaccagaaatgttgcaatcctgaagataacagaatcccatctttgaagttctaaaagaaaaaaaactgctaacttagaattctacatccagtggaaatatccttcaaaaatgaaggcaaaatgaataaataaaagctgagataacttatcaccagcacaactgcacaatgaaaaatattaaagaaagttcctcaagccaaagggaaatgataccagatagaaacagaactataatacacacaggaatgtgccagaaatggtaaatctatggggtcactatagaacacttttattttttaatttctttaaactacattgtctgcttaaagcaaaaatgaagtctcactaattcaagtcagactgtgctcagctaaggaactgaaataaaagagttgtaggtcagaagtcaatagaggaaagagaatactcacaagcacttcattaacccaaaaagaggcaggagagtcggggagaaggaacaaagaatagatgggaaaatctagaacaaatagcaagatggtagaattagatgcaacctaactcaatgctatggtgaatgaaatgaaaccatggcaatggaactctggtatagctgccctcatcacacgtgaggctctggctgtgcgtttctgggtgaaggggaggaaggtgacgaggaaggaagtagaaaagcaaacttatgggacatagaaattctaataaaataggttctaggtgctcaagcctagagacatgcttctaagtccaactactcactgtgaatacctggtggaaagatgacaccctttccaccagggtggatgacgtcaagcagacccaccaataaactaaccacctgccaaaacaaatgcaatgctctttaaaggaagacaataaagcccataatgtttagcatgtaataaaaaattactcggcctggcgcagtggctcacacctgtaatcccagcactttgggaggctgaagcaggtggatcacctgaggtcaggagttcgagaccagcctggccaacatggaaaaaccccgtctctactaaaaatacaaaaaattacttgggtgtggtggcatgtgcctgtaatcccagctactcaggaggctgaggcaggagaatcgcttgaaaccgggaggcgaaggtggcagtgagctgagatcgcgccactgcgctccagcctgggcaacaagagcaagactccaactcaaaaaaaaaaaaaaaaattactcaatatgtaacaaggaggaaacaaaagcagtcaacagaaagagttccagaggcgatacagatggaattccaccaggaaaactagaaaaaggctctgtctacagaagggacagtgtaaacagaatggcagaagagagcagaaacagaggatctagaaagaagaagtataatccaacgctgacatagggaggagggaactgtaaaattagaatctgacaaggttttaataggcaataggcaacgatcaattaaaacagggctgtcatgatacgtctggacagactcagttatttgacccatgaaggttctggagatgaaggcactgcaacaccaggtctaaatgtgtcatcccaaacatttgtagctaagtggcagagagaaatgaccaagaatgattcagttcagttcggcactcgtttactggggaccttctgacaccaggctctgtgtcaggtacagaggatataaaaattactaagaccaagtccatgcctttaaggggaaacccagttctactgggggaaacaggcatggcaacacatcagaaagtagtgtgtccaagcatccacctgtcacttaccagctgagagagtctggatatgtgccctgcccaaatctcatgttggattgtaatcccccgtgttgaaggtggggcctggtgggaggtgactgacccacgggagtggatttctcattaatggtttagccccaaccccaggatgctgtccttacgaaagtgagttcattctcatgagatctggtcgtttcaaagtgtctggcacctccccctcccttgctcctgttttgccacgtgatatgcctgcttcgactttgcactccaccacgattggaagcttccttaggcctccccagaagcagatgctgctatgcttcctgtatagcctgcagaaccatgaaccaataatacctcttttcttataaattactcagtctccggtatttctttgtagcagtgcaagaatggcctagcacaccagctatgtggctttgcacaaatcctttaacctcagtttcatcatccataaaatgaggataataataaccacctagcaagactaatgtgaacattctagaaataattttaaaagtgcctagctcaccacctggcctatagtaattcagcagctctcaacttgagaacaagacacacattagaatctaggtggcaaaaggagggtatttctaactagtcccagcctacctcccactcatatcctgattcccctggaaggatgtgcctacctattctaaacccattaccctggatgaagaaacactatgtctcatgcacgatataaagtgtgggagtgtgttttgcatgtgaatgatgcataggtagaataaagtttgagaatcactctgtaagcattcatctcagttcaacacttataaagcacctactgtgtgccaggctcataaaaaaactagtttggattatttccacataatgatagaggtatgtataaaatcctaagagaatataatacaggagaaggcactcagcctggggggtcaggaaggcccacaagccttggcagttacccggactagcaaaggtgagaagatcatctcaggggaatagaaaggtataagttggcaatagcatggtgtgtgcaaggaactaggatccaagcatcaaacagggtcaaggaattaaatatttgggagaggcagacaagcgcaagtttatgaaagacatgcaaagaaacctacttaatcctgtgggtggtgagagccacagaagagcatgatgaaaaggagacccaggctcctctgtgctccaggtcagtatctctgaaagcagttcccaagctaaatgtcatgatgaaagcacaaggagcctcagagagctcagcctgcagaggaattcattcctcaggggcagtgtgcactgctcactcaactttgcttctccagcacccacccaagtctgaccccactggaggcactaggttcattgtacagaactgatattaataaacttccttatccagaacttgtgcaatagccgagcatagtggctcaggcctgtaattccaacactttgggaggccacggcaggcagattgcttgagcccaggagttcgagaccagcctgggcaacatggtgaaggcccatctctacagaactacaaaaattagccaggagtggtggtgcacgcctgtggtcccagctactaaggaggctgaggtgggaggatctcttcagtctaggaagtcgaggctgcagtgagccatgattgcaacactgcactccagcctgggcaaaagagtgagaccctgtctccaataaaaaaaaaaacaaaacaaaaaagagaacctgtgcattttaacattatctccaactatggaattcattcaatcaccaacttttattaaccatcaagcagggagggaagatatgaacagaaatacagtcagggctttacgacagggatacatctgggaaatgcatcattaggcagttttgttgtgtgaacatgatagagtgcactcacagaatcctagatggtacagcctacagcctacaacacaaacaggctacggtgtatagcccattgctccttggctacaaacctgtacagcaagtaactgtactgaatatcatagccacttgtaacacaatggtatttgggtatctaaacaaacctcacgtgaaaaaggtacagtataaaagattaaaaatgggctgggcgtggtggctcatgcctgtaatcccagcactttgggaggccaaggtgggcggatcacgaggtcaggagatcgagaccatcctggctaacacagtgaaaccccgtctctactgaaaatacaaaaaattagccgggcatggtggcaggcgcctgtagtcccagctactcaagaggctaaggcaggagaatggcatgaacccgggaggcggagcttgcagtgagccaagactgggccactgtactccagcctgggcgacagagcgagactccatctcaaaaaaaaaaaaaaaaaaaagattaaaaatggtacacctgtatagggcacttaccaaaatggctgttgcagaactcgaagttactctcggtgagtcagtgagtgagtggtgagtgaatgtgaaggactgggatattattgtccactactgtagactttataaacacagtacacttaggctacactgtttatttttaaaataaagtaattgagctacaacatgacaatggctacagcgtcactaggtgataggaatttttcagccccattataatcttatgggaccaccttcatacatacagtcggtttttgactgaaacatcattacattcagcacgtgaatgtaattgcgatgaagtgaaagataaaggttatagttctagtgtatccacagtgctttaggagatgaactgttagggaaagccagaaaaatctccaccacggaaaaaatatttggcctgcgtcttgaaggataaataggaagtcagtactcagacaggtgccagtgtttttcagcctgaggcagggaggtatgagagacagctggaagggtttgagaatgggtggtgagaacttacacttactggggactggatataagaatgcagtaagacgtggacctagcaccgtgatttttcgacctgggctacacatcagaaacacctagcgagcttttaaatcttccagggcccaaaccacattgtgaaccaattaaatcaggacgtctggggctagaagccagtcatcagtatctttttttaagctcccaaagtgattccaatgtgctgccaagtctcagaaccactagtctagaaaggagggataaggattttcagcagcccccacagaaccggccctcctggtgaccctgcaatcctggcacacacaccccaccccgcctgggagaaagaccggccacaccacagtcatcggctgtttcctgctgctcctttcctcccaccagcattttactctgaaatagtggttctcaaagtgtggtctccagactgtagcatcagcctcagggggaaattcttaaaaatgcaaatttcccagccgcaccctggacgcattcacccaaaaactctgggagtggagcccagcaactgagccatgctaaggttggtgagccgctgctctggaacattgatccctcccaaactgcagcaaagcaagcacctgggtgtagctctggctgtgtaggtgctactacaatctgctggagtcactgcttgtcggcagagatgccgtgggagctggcctgggtgcctccacgttggccgtcaccaccaggcagtggcctttggcctggaatcgaaggtaccagagggctgatagctcagtttttttatggcaccaagaaaagactttcagattggaggtatgggattttctttattttttaatcctcttttaatataaagtggccccttagcaaactttcaagatatttcacatcagaactggccgggaaatccggcatgtggacagacacggatatgccgtgtgcatttttccgttggaggaagagggtaggcttgggtgctggagggtgttgcctgggggcggagcgagaaggaagaaagggcgctgctggttcacacctcacccatgccctcctctcaggccccaatcaggatggaattaaaagaccctgggaggaaaataaggaaagcaacaaaggaaatgagttccccatacagaaagggaaattgcctttcccgttaaggtcagactggtccgaagtaaaggactggtgcgccttagcaaccgcctctgctgaagccctaacgctggagctctttcgccctcgcagaataaccgggactttcttgcagccggaaccagccacgtcctgattccacactcccttgaggagccagccagctccacatttactcaaagaatccgaagggcaccaagtggatgctctgccacacgattgaagagggcaagctgtctggggggttttccacctcttttcaactcaactattctgagctgaagtactggacccgttttgtttttcctgttttttcctgcttcggtaaatctggaaaaatcctgcaggtctgaaaaactgttggacttgacagcgtgtgtgtagcgccacctggtgaccacagcttatcaaaacagcttccttctggggctcttgtggatgtacatcaaaggctccagcttccagacaggtacacatcctgttctcacgcccggcccactttcccgtgggaatgtcagccactctgatttgccttggctgaaaacctcctgtctttgcatggaaaaaaacacaaataatatgaacaagcaacagagttttctttctctcttaagtaaccaagcatttaaaatcttctaaagcacacatttccctaattgagaaaggaagcagaagaaaaatttctggctgaaattataaatcataataaatggtcggaaataccttctcccttagattcctggggtcctagtgtagaggagacttcagttgcccttgacactacaacatcctgactaaaagcctgtttccaaggtgatatttgatagacatgaaggacccaggtggaaaagaaggtagtctggacggcacggcaaggagtggaacacgcaggctatgaggtgtcagcagaaatcagttctggtcctggcactgctaccaacttgctgtgtgaccttgggaagttacttaagctttgtggatctcaatgccccagactcgttaacttctttactattttttcccataaattcagtgtttctgaaabcgatgytsssyaccmgratgsatcctctarartmggasctkcaggcatgcaagctttctgtcttgagggatcagacgtataaatgtcaggcagaccttctgatgatcatgatgcaaccagagttaccacagtgagtccatatcacagacaaaggcgaagacacttgatcccttcttaacctggtctcccacccatgaatgatttttgttaggatttcagcatgttgaaactaacccacagaccctagttacaactttctcagggcctgagagctggggaatcccagtttgggaaccaaaaaactagaaaatcttgagggcaactctggctgtcatgaactaaaacagagcaaagatggaagcctgtggtatgtgcgtgcaggtagaatctcgatttgagaaatggcgttacaaggaattaacacttcagaaatgccagctctgtgccaggatttttttattttattatgtatatttgtcatggacaacatgttttgggaatatgtatacattgtggratggttaaataaagctaattacatatgcatgtgctcacaaagttatcattttaggggtgacttaaaatctctcagtgattttcaaaaatatatgttattaatcatagttgcaatgttgtacaatagatctcttgaacatatattcctcttgtctaactgaaattttatgttctttgaccatctccccaactgccccccaacaagcctgaaagccctggtaacccctattctactctctacttctttgagttcaactttttwagagtccacatatgagatcatgcagtatttgtctttctgtgcctgacttatttcacttagcacaatgtcctttgggttcatctatgtcacaagcaacaggatgtcctcctttttaaaagactgaatagtattccatggtgtgttttctttatccaaccccattttctttatccatccatccgttgatgaacacttaaacacttagttggtttcaaatcttggctattgtgaatagtgctgcaatgaacatggcagtacagatacctcttcaacataccaattttatttcctttggatatatatacccaggagtgggattgctagatcatatggtagtactatttttaattttttaaggaacctccatactgttttctgcaatggctgtgttaatttacattcccaccagcagtgcacaaggcttccctgctctccacaacctcgctagcatttgttatctttcatctttttgataacagcattccaacaggtatgaggtgatatctcattgtggttttaacatgtatttctctgataattagtgcagaagttttagatacagaatcacagttagtcctgacaataatctctaaaatacccatgcagatggggaaagagctgcagagaagttaaagaaattgtctgcaccttacagctgagaccagaaccaggtctgtataatttcagagcacataatctttcaaagtaacctaacaaaatcacagcaacttttaggttcacagagaacaggccaaaaaaacaaacaaacaaaaagaaagaaattatagtaatttccaggtatgaaccagtaatccaaactaaacatattttgttgaatgaatatcctggattctactatgtttctccaagtccccactgtcttaaaacatagcatttggggttcagtagttactgataaaccttttgcatatctatgcactgttagttctttaccctacacattattttattgtagtaaagccaattttctgacatttatctgaaagcaaactgtgaagtacttccattctacttcctggtgatttttagtgacctggtgccatttgaacgtatgtgtcctccaaaattcgtatgttgaaacttaaaccccaaagcaatggtattagaaggtggggcatttggaaggtgattaggtcatgaggccgccaccctcatgtgaatgggtttagtgcctttataaaagggctggaaggaactagctaggcccattgcccttccatctcttctgccacatgagggcgcagtatttatcccttctgctcttccaccttttccaccatgtgagaacaccagagaaaataccaatctgtggccaggcgtggtggctcacgcctgtaatcccagcactttgggaggctgaggtgggcggatcactaggtcaggagatcgagaccatcctggtcaacatggtgaaaccccatctctactaaaaatgcaaaaattagctgggcatgctagtgcgctcctgtagtcccagctactcaggaggctgaggcaggagaatcgcttgaacccgggaggcggaggttgcagtgagccaagattgcaccactgcactccactctggcaacagagcgagactctatctcaaaaaaaaagcaagcaagaaaataccatctgtgggacaggccttcactagacaccaaatctgctgacactgtgatctgggacttcccagcctccagaactgtgagaaataaatctcaactgcttatgaattacccagtctgtggtgttttgctatagcagcaggaacagactaagacattcagggtaatgtgtcatttcaagacatgaaagctcagttctgtaatattttcttctcttattcctttgataattttcttctacccatcatctgttttctctttctgaaacttctactagttaaatattaaacaactctggtttcttaacctttcttgtgtatattatgattcaactaggatcaaaaaaatatctaattaaacagtagcttaaacaaattaggggttttttttgtttttgtttttgttttcacacaagaagtcaagaagtcattggaccagtgttatttcagaggctcaggaatgtcagggcaaaaatatctggaactctcttggtctcttacccatggctacaagatagctgctgcagctccatccatcccatccacattcaaggcagaactaaatgagcagcagaaggaagcagaaaggtttgtatttgtatcagaagaataaagcctttccagaaattttctacagacttaaacttatgactccttgaccagaaatgtatcaaaaggcaaatttaattacaggaaagtctaagaaaggaagttttagtatcccaccatgaaagtgcaggaagacaagagaaaggagggttgtaatgaaggaatgagacaatccagtgccctattttcttttttcttttttttcttctctgagacagagtcttgctctgtccctcaggctggagtgcaatggtgccatctcagcttactttaaccttcgcctcccaggttcaagcgattctcctgcctcagcttcccgagtagctgggattacaggtgcccaccaccacgccaaactaatttttttgtatttttagtagagacagggtttcgccatgttggtcaggctggtctttaactcctgacctcatgtgatccacctgcctcggcctcccaaagtgctgggattacaggtgtaagccaccgcactgggccagtgtcctatttttgtcctttttttttttttttttttttttttacttcatgcaagaattcctcaattttatcttctaaactttctgttgatttttttttgtttctgccctaattattttaatttctaagagtgttttcttctgatattttttgttgtgttgttttaatagcttcctatcttgtttcatagctgtaataccttctcatctctctaaagatatttataacttctctttaagtccattttgttttttgccttttcctcataatattttctttttcttcaaaattgatagctctccccacacatagacattttagcctctgtcttctatttgggtagcgtccctcaaaagtctgatgatctgggctgttgattcatacataaatatgagacaccaagaagttgtttggaggagctgtgtgattaaattagaattgtcccctggcagcgtgcagagtgatcaggtgttgagccagctctttcatggggcagacccccacaaccagtgtcattatgtgtgagtattttctctggatttactgagtttttccattgattttccactctggtcttcaatataatggagttggagaccagggtccaagcagtaattccactgccatagtgggagcagggaggatggtgggagtactctgagccgaagactctggtcaatttctccagagaaggaacttcgtgttctacagaggttagagaaaggtcatactctgatggtgtggattagaggtctaaaagatcctttgagaaaccatcaaataatctctctgtcttcatctccatgatcttgtcctcctttgccccttccactgtactggtgtccccaatttcaaaaggtttcaggtgttctgttgaacaaatcttttgtttctcattactcttcccttcctgagatacgtgggtttcagcctccgctgctaagtgagttaccattcctcaaaccacttttcagcttctctactcttctctccctccaattctctctgtccttatgagtttatgcctttttagtccttcattgtaattttggacagggaggagagggtggaaatgaagctcagatatatgtaagtattgaatctgccatgctaaacgggaagtctacacatatttttttaatatttccaatttcacaacacaattcctccaaaaaaaacttatggagctttttattatgaatgtgtcactgacattcagtcataatctatcttagcaacgatataggcacataccagactgaaaagatttgacaaacggtattctgagaaacccacatttggtcaataatcaaggaaataatttgttaaaaaggaataagatgaaacaaatccacattgcgtttgagctctataagtcaaagatacagttttaaaaagtaaactcaagtaatccaatattacaagatctagagggtcaggacaaagtgagttaggcttgcacatcaaagaaatagctaggcaactaccaaaaatgtttccaggtgaaatcaagttgcaaaattgtataaacaatcttgagataattaaacaaaagaaaatatattttcagatgttaagggctgcagagggaaaaagagcgactctatatagagaaaattaatatactggagcttatctcctaagaatggcttctgaagcataaggtgtttttttttggttttttttttttttgagagtctcactctttcacccaggctggagtgcagtggcatgatcttggctaactgcaacctctgcctcttaggttcaagtgattctcgtgccttagcctcctgagtagctggaattacaggcacgtgccaccccacccagctaatttttgtatttttagtggagatgggatttcaccatgttggccaggctggtctcaaactcctcacctcaagtgatccacccacctcagcctcccaaagtgctgggattacaggcatgagtcaccatgcccagcctgaagcatacattcaatctaacaagtcttctaggtatttgttctacagacacagttacccaagtgctgaattgcatacattcaaggatatttattttggagtattttaaatcataacacaaaatgggaatattctataaatatttcaataaggtctgccagacccatatatccagtagccatgggaatgatatctaagctgtgagtgaaaaccaaaggattaaaaacatgggcatccaagagaaggtcagggttcaacgccagcacggtctttgacacagcggctagcaaagattcattggtctgtgcaccatttccagcagctatactccagagttgctggtgctcaccatctcttcacttctctgcctggtatttagaaataaggctgatctccttacagtgaataattctctggtgcaggccacgagaggagcctggacttcgtcctccttgtggcagtaaagaggagcctctcccctctcttctggaatggtatcagaggagcttagtagagactcgagattttcattattatccaaaggtcacaaggccacccccaccatgatgtcattggagactacctggagaggctcaaggacccgtgaatctataacaaaagatctaacatttatgtcctcagacttccaaaaggagagaagcaaaaagacataaccgaaaaagtattctcacagaaatatagttgaaaacttcccaaatttgccaagagatgtaaatgtacagtttcaacaggctgagcaaacctccaaacataataaacccaaagaaatccacaccaagagacatcataatcaaatttctgaaaactaaatacaaagaaaaaaatcttgaaatcagccagaggaaaacatggcagaaacaattaaaatcgaaatagatttctcatcataaaccatgtattccaaaagaaaagtgacacaaatatttttcaaatgctgaaagaaaagaactgtcaatccagagtcctatacccagtaaaaatatcctgtgagaattaaggggaaatcacaatattctcagatgaagaaaaactaagataatttgtcatcaggagaaccgccctagaagaatagctaaaggaagttgtctaaacagaaaagaaatgatacaaggaggatggaacaccatgaagcaaggaagagagtacatggtaagcaaaaatattggcaaacacaataggctttatttctcctcaagagttttccaaattgtatttgatggttgaagcaaaacttataacactatctgatgtggttctcaatgtatgtagaagaaatatttaagacaattatactataaacaggggaagataaaagggtgttatggggggaaagagttctatacttcactcaaaggataaaaaagaacatcagttgactgaaataggttatggatacacaatggaatacttagagcaatcactaaaagtgctatacaaagaaatacaaatgctaaaaaagaaatacattcaaaacactatagataggctgggtgatgtctcacacttataatcccagcactttgggaggctgaggtatgcggatcttttgaggtcaggagtttgagaccagcctggccaacactgtgaaaccctgtctctactaaaaatacaaaaattagccaggcatggtggcagacacctgtaatcccagctactcgggaggctgaggcacgagaatcatttgaacccaggaggcagaggttgcgatgagcagagatggcaccactgcactccagcctgagtgacagagcaagactccatctcaaaataaaacaaaacaccacagataaatcaaaatggaaaaatgttcaattaacccagaagacagagaaagtgaacagagaaacagaaagcagaacaaacaaaacaagaaataaaatgtcaggcttaagttatagcatatcaataagtacattaaatgcaagtagccaaaataatcaattaaaagacagattgacagattggatttacaaatatgacccacctgagtgaggcctggtggcttgcacctgtaataccagctacttggtaggctgaggtgggaggattgctcgaggctaggagctcaagaccagcctaggcaacatagcaagaccctcatctctaaagaaaaaaaaaaaatagctggaaatggcagcttgcacctgtagtcctagctactcgagagtctgaggtgggaggatcacttgagcccaggagttcgaggctgaggccacagtaagccatgatcacaccactacactccagcctgagtgatagagcaagacccttctctaaaatatatatattcagattgaaaaaaaaaggatagaaaaagacatagcatgcaagcattcataaaaggaaagcagagatcgagcactatggctcacacgtgtaatcccagcactttgggaggctgaggagggtggatcacttgaggtcaggagttcgataccagcctggccaacacggtgaaacccccgtctctactaaaaatacaaaaatcagctgggcttggttgtgggcacctgtaatcccagctactcaggagactgaggcaagacaattgcttgaatcctggaggcagaggttgcagtgagcagagatcgcaccattgtactccagcctggacaacagagtgagactctgtctcaaaaaaatggaaaacagaaatggttatattagtatcaagctaaagtagacttcagagcaaagaaaattgctagagacagggagggagactacataatgatcaaagggtcaatccaccaggaagtattaacaatactaactgtctgtatgccaaacaacagatctgcaaactatatgatgcaaaaactgatagaactgatagtagaaatagacaaatccacaattatagttggagactccaacactcctctctaaacaattgatagaacgagtagaccaaaaatcagcaaggctgtagaaaaactcaacaacaccatcaaccaacaggacctaattgacatttgtagaacagctgacacaatagcagaatatacattctaatacacatcagaatacacactaaacatacaccaagatagaccatatacattctaatatacatcagaatgcacactcaacacacaccaagatagaccatgtacgttctaatacacatcagaatgcacacgtggcctcccaaagtgctgggattacaagcatgagccaaagtgcccagcccaatatgaaatagataatttgaatagccctataactattaagaaaatttaattcataattttgaaattccctcccagaaaaatatccagacctaaatgctttcactagataactctaccaaatgtttaaagaattaacaccaattctacgtaatctcttccagaatataggtaaggagggaattcttagttcatttatgctgctataacaaaatacctgagactgcatcatttataagcaatataaattttttctcacagttctggaagctgggaagtccaagaccagagcaccagcagttctggagtctggtgagggctgctatctctgcttcaacatggcaccttgttgcatcctcctgggagaataaatgctgtatccttacatggcagaaggatagaaggacaaaaagggcctagctagtttcctccagacctttcatatggcactaatccattcatgagggctctccctcatgacttaataacttcttaaaaggcctcatctgttaacactaccataatggggattaagtttcaacatgaactttagaaagaacacaaacactcaacccatggtatcttcataattggttttatttctaccaagaccagatgaaggcagaaaactaccaaaaaaaaaaaaaaaaacaaaacaaaaaagtcagaaaaccacagatcaatactatcttgaaaacagacatgaaaatcctgaaaaaaaaaattagtaaataaaattcagcagtatgtaaaaagaattatacatctcgaccaagtggggcttattatagggaggcagagctagtccaatattggaaaatcaataaatgtaatcaaccatattaacaagctacagaagaaaaatcacatgatcatatcaattgatgtggaaaaagtatttgacaaaattcaacactcattcatgatttaaaaaaaactctcagaaaattatcaatagaaaagaaatgcatccacttagtaaaaagcacctataaaaaacctacagcaacattatacctgatggtgaaagtctgaatatttttcccttaaaatcaagaataagacaagcgtattcacacttacattcttattcaacatagtactgaaagttttagccagtgcagtaagacaaaaggatggggtgagggagaataaaaaggaagacattattatctatatatagaaaattccaaggagtatacaagaaaaacaaactcttagtactgagttcagtaaacttgcaggatataagataaacatacaaaaatcaattgtatttctatatactagcaatggacatgcagacatcaaaatttaaaatataatatcatttgcaatcactcaaaaagaatggaatacttaggtgtcagtctaataaaacatatccagggattttatgctgaagactatgctatgccgatgaaagaaataaaaatatctaaataaagggagagacatactgtgtttatgactagaagattcaacataataaaggtgtaaattctcccaaattgatatgaagtcttaatataattcctatcaaaatcccagaaagttttaaaaatagatataaacaagcttatcctaaaatttaaatgaaaaggcaaaggaactggacttcaaaacaattttgaaaaagaagaaaaaaagtgggaggtgactcagtctatctgatttcaagacatattatataggtcagtaatcgagactatgtgatattggtggagagatagacacataggtcaatggaacagaataaagaatccagaagcagatccacataaatatgcccaactgatttttgacaaggtgcaaaagcaactcaacaaaggagaaacaggctttcaacataagatgctggagtgattgcacatctattaccagaaataatgaacctcaacctaagcctcacacctcaagcaaaaattaactcaaaatggatcatgaacttaaatgtaaagccataaaacacttaggaaaaaaacataggataaaatagtcaagatctagaatgacgtaaagtgttgtgtttttttcacatatggagaatgccctgtgatagggttcttagacttgacaccaaaagcacagttcataaaaggaaagatgtataaactggacttcatcaagattttaaatttttgttctgtaaaaaatcttgttaagagaatgaaaagacaagctacagagtgggaagaaaatatttgcaaaccatatatctgacataggactagtatctggaatatataaagaactctcaaaaattaaacaataagaaagcaaacaatccaattaggaaatggacaaaacatgtgaagagacattttaacacagaaaatatacagacgacaaataagcacgtgaaaatatgttcaacagcataagccattcgtgaaattcaagttgaaaccactatgcagtattactacatatctatcaggatggctaagatgaaaaatagtgacaccaccaaattctgacaaggatgcagagaaactagatcactcatatgatgctggtgagaatgtgaaatggtggtgtttggaagtttcttagaaaagtaaacatgcaactgccatatgacccagcaattgagctcctgggtatttatctcagagaaatgaagacttgtagtcacacaaaagtttgtgcacaaatgtttatagcagctatattcataagagctcaaaactagaagcaatctagatgtccttcaataggtgactgcttagacaaaatatggtacattctatgcgatgttattcaacagtaaaaaggaacaaacttttgataaacacaacaacctagatgaatctccagaggattaggctgagtggggaaaaaagccaatcttggccgggcgcggtggctcacacctgtaatcccagcactttgggaggccgaggcaggcagatcacgaggtcaggagatcgagaccatcctggctaacacagtgaaaccccgtctctactaaaaatacaaaaaaattagctgggcgtggtggcgggtgcctgtagtcccagctactcgggtggctgaggcaggagaatggcgtgaacccgggaggcggagcttgcagtgagccgagatcgcgccactgcactccagcctgggcaacagagcgagactccgtctcaaaaaaaaacaaaaaacaaaaaacaaaaaaaaaagccaatctcaaaaggttgcctatgtatgatttcatttccataacgtttttgaaatgacaaaattctagaaatgaagagttgattagtggttgtcaggagttatggagggggtgggagcaggaagtcacgggttgtggctataaaatggcaagatgagggaactttatggtaacgaaaatgttctgtatcttgacagtatcaatgtctatatcctgattataacattgtgctattatatgctgttaccattggaaaaaaaatgggtaaacggtacacaggatcttgattatttcttacaactacatatgaatctacaattatctcaaaattaaaagttaatttttaaaaacaaattcagggcatacacatacaaaactaaatttatcttttataagttggcagggttctgctgatatagaccaggtggctctgctgaacttagctggcctcactcgtgtgtgctgctgatctaggctgggttcctccaggtcaactggagaatttgattctgtttcatgtatctgtcatcctcagcaggctggcctgggcatgttcttatggccatagctgaggtgcatgagaaaacaagctctagcttgggcgcagtggctcacgcctgtaatctcaacactttgggaggccaaagcaggtggatcacttgacgtcaggagttcgagaccagtctggtcaacttggtgaaaacccatctttactaaaaatacaaaaacttagccaggcgtggtggtgcacggctgtaatcccagctattcgtgaggctgaggcacgagaatcgcttgagcccaggaggcaaatgttgcagtgagccaagatggcaccactggctgggtgcagtggctcacgcctgtgatcccagcactttgggagactgaggctggtggatcacctgaagtcaggagtttgagaccagcctgaccaatatggtgaaaccctatctctactaaaaatacaaaaattagccagacatggtgacgtgcgcctgtagtcccagctacttagaaggctgagacaggagaattgcttgaacccgggaggcagaggttgcagtgagccaagatcgtgccactgcactctagcctgggcaacaaagcaaaactccatctcaaaaaacaaacaaacaaaaaaaaatcacaccactgcactcctgcactccactctgggtaacagagtgagacaagacgagacaagacaggacaggacaggacaggacacgacaggacaggacaggacaggacagggaaaggaaaggaaagaaaaggggaaagggaagaagaaaacaagttctcgtggacaaacctctctacagcccaaatttgagtcacggcttttacacactaatgacaaaagcaagtcacatgattgagcccagaaccaggggacagggcaggtcattcatgcatggtgggagggcactgtgaagttacgtggcaacaggcatgaatatggggcagaggaggtgaaaagctggggtcaaggactctaccaccatccttgaacacctccaggactaaaaatacctattgcggctttctcttcttactgcagtaactcttacccactcccccactctacctgcctcatccaagtgagggggaaatgaaaggaagaagaggaaacagagcattgaaaatgtgtgcctctgtgtgtgtctgtgtgtctgtgtgtgtctgcgtttgtgtctatctgtgtctctctgtgtgtctgtgtctgtgtatgtgtgtctgtgtgtatgtctgtgtatctctgtgtgtctatgtgtgtgcctgtgtgtgcctgcgtgtccgtatatgtatgtgtttgtctctgtgtctgtgtatctgtgtgtctgtgtatcagtgtgtgtgtgtctatcagtgtgtgtgtctgtgtatcagtgtctgtgtgtctgtttgtgtatctgtgtgtctgtgtatctgtgtgtgtctgtgtgtgtgcctgtgtgtgtctgtgtatctgtgtgtctgtgtgtctctgtgtgtggctgtgtgtgtctctgtgtgtgtgtgtacctgtatctgtgtatctgtgtgtgtgtctctgtgtgtgtctgtgtgtgtgcctgtgtgtgtctgtgtatctgtgtgtctgtctctgtgtgtggctgtgtgtgtctctgtgtgtgtgtctgtgtttctgtgtgtgtctgtgtatctgtgtgtatgtctgtgtatgtgtgtgtgtgtctgtgtgtgtctgcatgtgtgcctctgtgtgtgtatctgtatgtctgtgtatgtgtccctgtgtatgtgtctctgtgtatctgtgtgtctctttgtgtgtgtctgtgggtatgttgtggaaatccttggaaatctcctatttgtgggaactgaatccccagcactgccatgtaaatatttttccctctcatgggccactgtggccattgtccattgtttcaaagaccctacaacaggatctgagtttccctttgccaaaagacaggtcacagggaagggaacacagctgacccttgaacaatgtggggttagggatgctgacccccacgtcgtcaaaaatccgcgtataacttttgattcccaaaaaaggagtcaggctgatgtctgcccaatattctactgaacttaactaccaagagcctacagttgactgggaaaccttgctgataacatagtcagttaactcatatttcgtgtatgaattatataatgtattcttacaataaagtaagccaaagaaaagaaaatactattaagaaaatcatgaggaagaaaaatatttcctcttcgttaagtgcaagtggagtttcatgaaggttttcatccttattgtcttcacactgagtagggtgcggaggaggaagcggaggggttattcttgctgtctctgggtggcagaggcagaagaggcggaggaagtaaaagggaaggcaggagaggcagacacactcagtgtagcttgtactggaaaaaacctgtgtataagtgaacctgtgcagttcaaatccgtcttgttcaagggtcaactctctataacgtctacaaatgtcctaccctgcgccaggctgcctctgccccaatctttattccatcttctgccccatctctgactctcttctcacctttacagttttctagagtccttgttcctttcctagcacgcacccagactttatgttatgagaatccctgtccaaagccactgagagcagtctctttgcctccgtatcttcattagtaaaacatgggtatcagcagtgcccacctcacagcgttgatgtgaggatgaagcgacatgactgataatgagtttacactgcccggtatgcggtgattcctcaataaattgcaggatgtgttttttcttttcttttaatatgggggtaggggctgcccagtctcactgcagacagctaaaggaatcgcagcaccaggcgcgatggctcacgcctgtaatcccaacactttgggaggccgaggcgggtgcatcacgaggtcaggagttttgagaccaacctggcaacatggtgaaaacccatctctactaaaaatacaaaaattagccggacctggtggcgagcgcctgtagccccagctactcaggaggctgaagcaagagaatcgcttgaacccgggaggcagaggttgtagtgagccgagaccgcgccaatgcactccagcctgggcgacagagcgagactccatctaaaaaaaaaaaaaaaaaaaaaaaaaggaatcccagcaatccaaggcggaattctagaaatagtttcccgtagaaacaccgttctacactgcagtcttattctatcccactattattactcccaaagattctaaggtcccagtgctttcgcttcatcctagaggctaaatgggctcccctggactcgcctggcagaactaaccacctagaagaacgttattgtaagggggaaatgtgagtgctacataagtttcttataaatgtgcttttgaaatagagtccactcttaagtttgatatttcctaaaatttaatgtgtgaaggaagatgcttgggagacaatccgtttatcaggctgatatatggcagatagtctactgacctccctgagcaagaaccttaggaatgaggccaggtggcagaaacactcagggccaagggtagggagcaaaactgtgatgtaaagagacctagatggacttgggaggaggtggggttcaataggaggccacgactaatgccctggcatgcaaaggctggacaggagtcttgaaagagcctcaattagctgggcgtggtggcgggcgcatgtagtcccagctactcgggaggctgaggcaggagaatggcgtgaacccgagaggcggagcttgcagtgagcctagattgcgccactgcactccaacctgggcgacagagggagacaccatctcaaaaaaaaaaaaaaaaagaaaagaaaagaaaagaagaaacaaagagcctcaaaaatatggaaaaccagatcctaagagcaaaatgccaagggggacacttattagtgaggagtctgcaaaaacagaaaggttttagccagaagcttataggagtagacctggaacccaaattgaaaaggaacagtgcgacccgtaatttgagaaggaaatagaataggcagaagaactacagaaactatagcttcgagtctaagagcctatttacaggggtgtccaatcttttggcttccctgggccacactggaagaagaattgtcttgggccacacataaaacacactaacactaatagctgatgagctaaaaaaaaaaaaaaaaaaaagaaaagaaaagaaaagaaaaaagaatggccgtgcataaatctcataatgttttaagaaagtttacaaatttgtgttgagccacattcaaagccatcctgggcctcatgcagcccgtggaagcttgcataagagagagatttaggaccttttggcggaagtgctcgataaggattgaatagcaccataaactgaagctaaactgaaaggttttagaatttaacttaagacacctcaaatgcttttagatgaaactcaggacttttcactgtagtaaagttcagcgtgaaattgaccttgtaggggcaccagacagcagtgagcagggtgtataagagtgagggaggggttaataaatagagatggtgggaaaaggagctggcttttcgtgagttcagcttcttgcagactagactagcaagagtcaagaatgaacctaagccagactcaggtctactgggcagtgctaggcctgtctcaaccctgtttgcacatcaggtaccccatgcgtctgctgtagtctgtagctacatgggaacctaaaacatcaccgaggtttctagtgatgttgaaactcagctaataaacagggaatcccgagggttcccctctactccactcctgacagtggccatcctgcctctgcttgaataccttaactcgcctctcatgaggcacccatctcctcattaaatgattgtcactgggaagaatccgccccacacagccagatcaaatttaccccctggtaactttcagcccctggtccccattctgctctttagcactaggtagctgaatcgaatctttccatgagagtcaattccattcctcctaaatcttctctcttctaagataaatagtccacattatacaatcttaatacccaattcaatgagcacttcatgatagtctaatatatgcaaagcaccatgcttgtgccaagtgggaccctaaagcgaatattatctccttgctctttaggcaaacagggtgaagacaagaggcataggtgatggacactaaaacaaagaccgtaagtactgtaatagctacacacaacttacaatcatataggcatggggaaagagtagcccagcttaccttggaggatctggaaaggttctaagaagaagtggaattgagttggagttggaaagacttcaacaatcagatgtgagaaggacgtgggtggtgagtgcaaagaaaataggacacggctgaggaccttgttttctttttcttttttgaggtttttttcttcttcctttgtttttcgttttatttttatttttcattaacaagtagtaataatacatgtttatggagtacaatttgatgttttgatataggtttacaatgtggaatgattaaatcaggctaattagtaaatccatcacctcacaaacttaccaattttttgcagtaaaaacatttaagatctacttttagcaattttgaaatatacaatgcattattacttattatagttaccatgctgtgcaattgattagtaaagcttattcctcttgtctaactgaaactgtgtagccttttcccaaccaccgctccacccccagtccctggtaaccaccattgtactctctacttctatgagatcaactttctcagatcctacctatgagtgagatcgtgcaatatttgtctttctgtgcctggcttatttcacttagcgtagtgtcctccagattcatccatgttgtcccaaatcacaggatttcacccctgtttaaggctgagtagtattctattgtgcatatataccacattttctttattcattcatctgttgatggacacctagattgattccatatcttggctatggtaaatcgtgttgcaatgaacatgggagttcaggtgtctcttcaacatactgatttcaatgcctttggataaatacccagaagtgggattgctgtatcaggaccttggtttcttagcttctgtctgaccttgagcatacctaaaataagagccctgaacgagataatttctaaagtttagtgatagagaccaaaaggagtatacgtctgagcattccaacttaggccaaagcctaaaagtgagaagcctgcccatatcaagggagtgaggtgtgtgtttggggcaggggtagtagaagagcaagacggttcatgaattcagtattcttgtttcactgatgcagcacccatcaccattctgatcaggtcccttggggacatggacagtgtccttagaatgacaatgatgatggtaccaccagcaccaccaccaccatttctctagcatgtgggtgagccaaacacctttggaaacaccttacatatttacatttacatcctactgaatcctcataacagccctgtgagatagatagaatttttattattctcattttacaaattagaaagctgaggcacagaaaggttaaataacttgcccaagtccatagggctaatctaatagcagagctgggatttgaaggcaagtagtctcactccctgcttttcttcctcgaaaaacacaagggcagggctgaactcagctcaggggacacaatctataccaggacaaggttacaatggccctataacttcttcttcttcttttttttttttttgagacgaagtttcactcttgttgcccaggctggagtgcaatggcgcaatctcagctcactgcaacctccacctcccgggttcaagcaattctcctgcctcagcctcccgagtagctggggttacaggcatgtgccaccacacccggctaattttgtatttttagtagagatggggtttctccatgttggttaggctggtctcgaacttccaacctcaggtacccgccttggcctcccaaagtgctgggattacaggcgtgagccaccatgcccagccggcaatataacttcttttgcattctcattaactcagcctcagacgacactggcttccttggaagccactgcatactgatgattgaagtggagctgacaatcacctaaaaacccctaaatgcctttgacatgagccactcttaagccaggtctctcccattctgttcacgtgtggctgatcagttcaaactaaatgttgggttttacgttgaaccctatacaattctaggttttagcttatagtttcaccctactataattttgaaacatgatatgttacctaatgttacctctcccggtttagtaataacataaacaaaaacagttgacagttatgggggccctgactttgtgccagacaccctgctacgtatttgtttgtttaatgtaataccttatataatcatttagtctttacacaaagttaaatattattattattctcacttaataggataggaaaccaagtctagtgaagttaagaagcttgctcaaaatccaattaggggctgggcgcagtagctcatgcctgtaatcccagctctttggaaggccaaggcaggtggatcacctgaagtcaggagttcgagaccagccaggccaacatggagaaaccccatatctactaaaaatacaaaaaattagccaggcgtggtggcaggtgcctgtaatcccagttacttgggaggctgaggcaggagaattgcttgaacccaggaggtggaggttgcagtgagccgagatcatgccactgcactccaacctgggcaacagagcaagactccatctcgaaaaaaaaaaaaaataaaatccaattaggaagggactgacccaagagtcatacctaggattatctgactccagggcctgaacttttatctatgttctctgcagcgtcctcacatcttctacacacttgttattatctaagtcaatcatgaaaaatgatgaaacaggccaggcgtgttggctcacacctgtaatcccagcactttgggaggccgaggcgggcagatcatgaggtcaggagatcgagaccagcctggccaacagggtgaaaccccatctctactaaaaatacaaaatgagccaggcgtggtggcatgtgcctgtagtcccagctactcgggaggctgaggcaggagaatcgcttgaacccaggaggcaaaggttgcagtgacctgagatcacaccactggactccagcctgggcgacagagcgagactccatctcaaaaaaaaaaaaaagaataaagaaaaatgatgaaacagaatcagggagagaattcagaggaaaatgacatccctccaggtgtgtatgaaccaattactcatagagtcataaacagttagagaatgaggcatttttcacaaaatattgagggctggagaggttgaacaatttgctcccactcacacatctaggaaagagaggagatggaaaagtaaacaatccagaaaggtcaaggccctcattccatcaatgcacaattcaagtacacatacgtgggaaaccatctgaaaagttttgtaattacaatttcatctagccagcaattctccaactcattcacatgcatctcatgacatcgttgtcagaagccttgctagagtgaacgtgcacttcatcaaacacacccctgatccgtgggagatgggattcgtttgtgctgatctactctccaggaacacaagaaactcaccattctaacggttcataaatcatccatttaataccccagtttcagattttgcaggaattaacatcaatgcacggtttttgagacccgccaacttgctgaaacagtgcaagccacctgcagtcctcggataccactcagtgatggccctaggtctccctactctgggcctgagattcacttacagctgcaaaacacacctgtgcactctcctcataggcagaacgctttcacttctcagtcatttccaactgagactgttttctctggtagagaatacagaagtcaaatggactcagagtggttctgccttgtctctgccttctgttgttgagaataaaccagaaaaatcccttcttctgtcattaacattttcaagaagctccgttcagtccagtgctcttatttcaggcctatcacaccctttcatatttgtgttttcatagccactgacaaagactgtgtccttgaccaaactttagtcaggttcctctgagcccaatcaggccccatccttgggcatgcccccacccccaatgtctgatcaccctcaaaatctgatcaaattcctcatccctcatcatccccgaggcgatgtctgatcaccctgcctggtcttcagcaaaaatcacactaggtcaacttagccagaatcccctgactcccaatgtttccccttagtaattttccacccactgaccccaccttattccttggttacaaatccccatttgcctctgctgcattcagagttgagcccagtttctctccctgaccacaagaccctattgcagtggtccgtccctacaccaactgcgatagtcccggataaaatctgccttacccttttaacaagggtcaagagtaaatttttccttaacatctcctgtgggcactatttgtatacatttaaagtgagagcttatccaagagcttcctttttagcctggcaatcaagtatcctttttgcttctttctcccgatcactccctaaacccctcatctatagtaagaagcagaatcagaatttgactccaagactgtgcctgaggagcctgagccctaaatactgtgctctattgttacctgtgttatctgtaaataactgagccattgattaaaacacagttaataggctgggcacggtggctcacgctcactcgtaatcccagcactttgggaggccaaggtgggcggatcaactgaggtcaggagttcgagaccagcctgaccaacatggtgaaaccccatctctactaaaatacaaaagttagctgggcgtggtggtaggcgcctgtaatcccagctactcaggaggctgaggcaggaaaatcgcttaaacctggaaggcctcggaggttgcagtgagccgagattgcgccactgcactccagcctggacgacaagagcgaaactccatctcaaaacaaaaacaaaacacaatcaataacagaacctagagatctctagctagatgcatctcaatcaattaagcatgcaatcaaagagactgaaggggacctgaggtccagataatttaagtgatttaaccaacgttaaagattatttcttaaggggaaaatcatgactctcacatgatataaaagaacatgtggcaaatattttatttaactaatttaactggagccagcaaaatattaaaaccagctcaaaggagaaaactccaactaccacacatttatagtcagataagaaataccgaaataaatttacaaacaggcaaaactggaaaaactggttaatatctacaggacaataaacaaaggcattccacgggagactatttgcattataatatgcaaggaattatttgcattacgatcagttttctatatgttaacttctttctaaggagttgtaaaatagcataatcaaaagcaaataaataagcatatctctataaaatcagataatccccaaaggctctaacattccattgaaaggatatccagtaatctctttgcccattgcaaatctttccatttttccctacgccaaagtcaaaaagcagtaatagcaactccagaaaagaggtgaagagagccgggctcggtggctcacgcctgtaatcccagcactttgggaggccgaggcgggtggatcacctgaggtcgggagttcgagaccagcctgaccaacatggagaaaccccttctctactaaaaatacaaaattagctgggtgtggtgacacatgcctgtaatcccagctactagggaggctgaggcagaagaattgcttgaacctgggaggcggatgttgcagtgagccgagatcgcaccactgcactccagcctgggcaataagagcaaaactccattaaaaaaaaaaaaaaagaagtgaagaacatcaacaaactgggctgcatctgaaccatgtgaagaagatggtcaggtttagtggttagcgtcatgggccttaaagacagtgcctgggctccctcaaattccagctttgcctcatgtgctcgtgtgaccctgggaaattttacttaagtcttttgtgtgtttgtctttttttttttttttttttgagatggagtctctgttgcccaggctggaggagtacagtggctccatcttggctcactgcaacctccccctcctgtgttcaagcaattcttttgcctcggcctccccgagtagctgggactacaggtgtgtgccaccacgcccagctaaatttttttgtgtttttagtagcgacgaggtttcaccatgttggccaggctgttctccaactcttgacctcaggtgatctgcccgcctcggcctcccaaagtgctgggattacaggcgtgagtcattgtgcccagactcttttttttttcttttttttgagacggagtctctgttgcccaggctagagtgcagtggcatgatgtcggctcactgcaacctccgcttcccgggttcaagcgattctcctgcctcagcctcccgagtagctgggattacagtcatgtgccaccacacttggctaattttgtatatttagtagagacggggtttcagacggggttggccaggctgttctgtaacattctaccacaaaagaagtgaaaatggcctgttcctgccttaactgatgacattgtcttgtgaaattccttctcctggctcatcctggctcaaaagctcccccactgagtaccttgtgacccccactcctgcccgccagagaacccccctttttcctttacctacccaaatcctataaaacagccccaccccatctcccttcactgactctcttttcggactcagcccgcctgcacccaggtgaaataaacagccatgttgctcacacaaagcctgtttggtggtctcttcacaccgacgcgcatgaaatttggtgccatgactcagatgggggacctcccttgggagatcaatcccctgtcctcccactctttgctccgtgagaaagatccacctatgacctcaggttctcagaccaagcagcccaagaaacatctcaccaatttcaaatccagtaagcggcctctttttactctcttctccaacctccctaaccctcagcctctttctcctttcaatcttggcgccacacttcaatctctcccttcttttaatttcagttcctttcattttctggtagagacaaaggagacacgttttatccgtagacccaaaactccggtgccggtcacggactgggaatgcagccttcccttagtgtttaatcattgcaaggacacctctctgattattcccccacgtttcagaggtgtcagaccacacagggacgcctgccttggtccttcacccttagcggcaagtcccgcttttctgggggaggggcaagtaccccaaccccttctctccgtgtctctaccccttctccacctttctggggtgcaagaaacccccaaccccttatccttcacccttagcggcaagtccggcttttctggaggagaggcaagtaccccaacctcatatctctgcaccccaatcccttatttctgcaccctgacctcatatctctgtgccccaatcccttatttctgcaccccaacctcatatctctgctccccgatcccttatttccatgccccaacctcttatatctctgcaccccatcccttatttccatgccccaacctcctatctctgtgcctgaccccttctctgcttttctggagggcaagaaccccctaccccttctccgtgtctctactcttttctctgggcttgcctccttcactataggcaagcttccaccttccattcctccttcttcttccttagcctgtgttcttaagaacttaaaacctcttcaactctcacctgacctaaaatctaagtgtcttattttcttctgcaatgccgcttgaccccaatacaaactccacagtagttccaaatagccagaaaacagcactttcaatttttccatcctacaagatctaaataatgcttgtcgtaaaataggcaaatggtctgagatgcctgatgtccaggcattcttttacacatccgtccctctctagtctctgttcccaatgcaactcatcacaaatcttccttctttccctcccacctgtcccctcagtcccaaccccaagcgtcgccgagtctttctaatcttccttttctacagacccatctgacctctctcctcctcgccaggccgagctaggtcgcaattcttcctcagcctctgctcctccaccctataatccttttatcacctcccctcctcacacccggtccggcttacagtttcgttccatgactagccctccccctcctgcccagcaatttactcttgaaaaggtggctggagctaaattaaagttaatgctcctttttctttatcccaaatcagatagcgtttaggctctttttcatcaaatataaaaaacccagcccagttcatggctcgttcggcagcaaccctgagacactttacagccctagaccctaaaaggtcaaaaggccgtcttattctcaaaatacattttattacccaatctgctcccgacattaaataaaactccaaaaattaaattccggccctcaaaccccacaacaggatttaattaacctcgccttcaaggtgtacaataatagaaaaaagttgcaattccttgccttcactgtgagacaaaccccagccacatctccagcacacaagaacttccaaaggcctaaacctcagcgtccaggcgttcctccagaacctcctccccgaggagcttgctacaagtgccagaaatctgaccaccaggccaaggaatgcctgcagcccaggattcctcctaagccgtgtcccatctgtgcgggaccccactggaaatcagactgttcaactcacctggcagccactcccagagcccctggaactctggccgaaggctctctgactgactccttctcagcttagcggctgaagactgacgctgcccgatagcttcggaagtcccgtagaccatcacagatgccgagctttaggtaactctcacagtggagggtaagcccgtccccttcttaatcaatacggaggctacccactccacattaccttcttttcaagggcctgtttcccttgcctccataactgttgtgggtattgatggccaggcttctaaacctcttaaaactccccaactctagtgccaacttagacaatactcttttaagcactcctttttagttatccccacctgcccagttcccttattagactgagacactttaactaaattatctgcttccctgactattcctgggctacagccacacctaattaccaccttttccctcagttcaaagcctccttcacatcctccccttgtatctccccaccttaacccacaagtataagatacctctactccctccttggcgaccaatcacacaccccttaccatctcattaaaacctaatcacccttactccgctcaatgccaagatcccatcccacagcacgctttaaaaggattaaagcctgttgtcactcgcctgctacagcatggccttttaaagcctataaactctccttacaattcccccatcttacctgtcctagaacaagacaagccttacaagttagttcaggatctatgccttatcaaccaaattgttttgcctatccaccccgtggtgccaaacccatatactctcctatcctcaatacgtccctccacaacccattattctgttctggatctcaaacatgctttctttactattcctttgcacccttcatcctagcctctcttcgctgtcacctggactgaccctgacacccatcaggctcagcaaattacctgggctgtactgccggaaggcttcacagacagcccccattacttcagtcaagcccaaatttcttcctcatctgttacctatctcagcataattctcataaaaacacacgtgctctccctgctgatcgtgtccgattaatctcccaaacctcaatcccttataaaacaacaactcctttccttcctaggcatggttagtgcagtccgaattcttacacaagagccaggaccgcaccctgtaacctttctatgcaaacaacttgaccttactgttttagcctagccctcatgtctccgtgcagtggctgctgccgccctaatacttttagaggccctcaaaatcacaaactatgctcaacttactctctacatttctcataacttccaaaatctattttcttcctcatacctgatgcatatactttctgctccccggctccttcagctgtactcactctttgttaagtcccacaattaccattgttcctggcccggacttcaatctggcctcccacattattcctgataccacacctgacccccatgactgtatctctctgatccacctgacactcaccccatttccccatatttccttctttcctgttcctcaccctgatcacgcttgatttattgatggcggttccaccaggcctaattgccacacaccagcaaaggcaggctatactatagtacaagccactagcccgcctcttagaacctctcatttcctttccatcgtggaaatctatcctcaaggaaataacttctcagtgttccatctgctattctactactcctcagggattattcaggtcccctcccttccctacacatcaagcttgaggatttacccccacccaggactggcaaattaactttactcaacatgccctgagtcagataactaaaatacctcttagtctaggtagacactttcactagataggaagaggcctttcctacagggtctgagaaggccaccgcagtcatttcttcccttcagtcagacataattcctcagtttagccttcccacctctatacagtctgataacagacgagcctttattagtcaaatcagccaagcagtttttcaggctcttagtattcagtgaaacctttatatccattacagtcctcagtcttcaggaaaagtagaacagactaaaggtcttttaaaaacacacctcaccaagctcagccaccaacttaaaaaggactgaacaatacttttaccactttcgcttctcagaattcaggcctgtcctcagaatgctacaaggtacagcccatttgagctcccatatagatgctcctttttattaggccccagtctcattccagacagcagaccaacttagactgtgccccaaaaaacttgtcatccctactatcttctgtctagtcatactcctattcaccattctcaactaatcatacatgccctgctcttgtttacactgccagtttacactgtttctccaagccatcacagctgatatctcctggtgctatccccaaactgccactcttaactcttgaagtaaataaataatctttgctggcaggactatgctgaatctccttaggcactctttaatcagatgtcctaggtcctcccaattcttagaccttttatacctgtttttctccttttcttattccgtttagtttttcaattcatacaaaactatatccaggccatcaccaataattctaaatgacaaatgtttcttctaacagccccacaatatcaccccttaccacaaaatcttccttcagcttaatctctcccactctaggttcccacgccaccccaatcccactcgaagcagccctgagaaacatcgcccattatctctccataccacccccaaaaattttcgctgtcccaacactttaccactatttcgttttatttttcttattaatataagaagacaggaatgtcaggcctctgagcccaagctaagccatcatatccccgtgacctgcacgtacacatccagatggccagttcctgccttaactgatgacattccaccacaaaagacgtgaaaatggcctgttcctgccttaactgatgacattgtcttgtgaaattccttctcctggctcatcctggctcaaaagctcccccactgagtaccttgtgacccccactcgtgcccgccagagaacaaccccccttcttcctttacctacccaaatcctgtaaaaccccatctcccttcgctgactctcttttcagactcagcccgcctgcacccaggtgaaataaacacccatgttgctcacacaaagcctgtttagtagtctcttcacatggacatgcatgaaactgacctcaagtaatccacctgcctcagcctcccaaagtgctgggattacaggcatgagccaccacgtgtggcctgtttgttttttgagacagttctgtcacccaggctggagtgcagtggtttgatcactgcagccttgaactcctgggctcaagtgatcctcccacctcagcctccagagtatgggactacaggcatgcagtaccatacctggctaatttttttgattttttttttctttttttgtagagatggggcctcactatgttacccaggctagtctcaaacacctggcctcatgcaatctgcttcccaaaagcacacccaaaaggtgtgagctaccatatcccacctacttaactcttttgtatctcagtttcttcatatgtaaaatgggcataactgtcgtgcctactacacagctgagttaataattggcatggactcagtaaaataagaactattattgttaggcctctttggagccatggccacaacagcatgcctatctttactctaaaaattttgcccaactaggctcagaattctctctcaaccatctccaattttacagtaaaatgaacattctgtctccaaggttcccattgcttctatgagaccaaccagtgcctctttgtcagccaaatgcaaggatagaacaatgtttatcaccgtggcttcctttgacttaagagatggtattagcagcaagtgtgaaatgacctatgtttatcaggagtcttccatggaagtcatggtagtcagatctcctatcacgattacctcctgccttggtgcagggcgtgatctctgtactaagaacgtctttctccatctcatctctggccaggccagttatagcaacacagcactatcacttcaatccttctattattttgtcttcactcaaaccacagataagaggatcttcctacaggtataggggagaagaaaatttatttttcctctaccctcctaggttttttggctggggccctgcaaattagactgacgaaagatagattaacaaaagaaaaacagacagaagtttattattaacacatgcatacacacaggatcgctcaatgatgagtgactcaaaggagtggtcagaaattgggcttatagagcaccttttaaaaaaatataaatttgtaaaaaagtgacaagacaggccgggtgcagtgagtggctcacgcatataatctcagcactttgggaggccgaggcaggcggatcacttgaagtcaggagtttgagaccagcctggccagcatggagaaaccctgtctctactaaaaacacaaaaattagctgggcatgatggcgtgcacctgtaatctaagtgactctggagactgaggcaggagaatcgcttgaaccggggaggcggaggttgcagtgagcagagattgcaccactgcactccaggctgggcgacagagtgagactccatctcaaaaaaaaaaaaaaagaagaagaagtgacaagacaaagggaaagagctttaggcttctggaggtggcaaactgtgggaaggtaagtagatgggaaaagtaatggaagataaagattgccttagtgaggttggttatgtaggttcctccagcgccatctctgggctgcttaagagtccagagttgtctccagcgactgagaatcttcctgtcctccctggtagggagacatggggagcagagagtttctctttgtttctatttttttttttttttgaggcgaagtctcgctctgttgcccaggctggagtgcagtggcacaatcttggctcactgcaacctctgccacccaggttcaagcgttctcctgcctcagcctcctgagtagctgagattacaggcacccaccaccatgcccagctaatttttgtatttttagtagagatggggtttcgccatgatgaccaggctggtcttgaactcctgacctcagatgatccacccacctcggcctcccaaagtgttggaattacaggcgtgagccaccgcacctggccgagagtttttcttgtgtctgcttcatcttcattgccttcagctcaaaatgatcttaaggttaaagtgttgtactttggggagtggcatgttgaccccttcacagatgttcttcataatgaatagtgcttctcctctgctccgtttcccaaatctttcatttcaaccagtcacagccttttattgctccattccaactctgatcctatttcattgagtttcatcattgatatcaaaacaaggataaatgtcaaaccccagagtaatctggtgtccactctaaaatctgctcatctggcctttcaagtcttctttggttactcagtgatgggcaaaaaccccaacgttttcctgaggatgggctttttatctatattattcaaactcttaggcatttttatctaagatatatttccagtgatgatataaatcaattccagaatcatagattaaagtgaattcaaagcatatataacaatttcaaaaatattcatacccaataattccactctcaggcatcatttctcaggaaacaatagaaaatgtgagcaaagatgaaaagctctaccctgcagcattatttgtaacagtaagcacttgaagacaaacaaaacattattattattattttttttttttttttttgagacagagtctcgctctgtcgcccaggctggagtggcgcaatctcggctcactgcaagctccgcctcccgggttcacgccattctcctgcctcagcctcctgagtagctgggactacaggcgcccaccaccatgtctagctaattttttgtatttttagtagagacggggtttcgctgtgttagccaggatggtctcgatctcctgacctcgtgatctacctgccttggcctcccaaagtgctgggattacaagcatgagccaccgcacctggtgacaaacaaaacatttaaaaatagttggctggctgattatttgatttgatttgatttttattttgatttttttggagactgagtctcgctctgtcacccaggctggagtgcagtggtgtgatcccagctcactgcaacctctgcctcctgggttcaagtgattctcctctggatgaatatttttagtgctatcattcactggaatgatgtcgccactaaaaaattttatttacaaaataagtttattagaagttatgatggctggacgtggtggctcacacctgtaatcccagcacttttgggaggctgaggcagacaaatatcttgagctcaggagttggagaccagtctggccaacatagtgaaaccccgtctttattaaaaatacaaaaatgagccaggcgtggtggcacatgcctgtaattgcaactactctggagactgaggtgggagaatagcttgaacccgggaggcagaggttgcagtgagccgagatcgtgccactgcactccagcctggggaacagagtgagactctgtctgaagaaaaaaaaagaatcatcctgactttccttatagagagggggagggcagagagtttgtcctgtgtctcctttttctcaaagaaaagaagggacgtccaccaaatttttagcagcatttcccactgaatgactgcattatggcaatccttattatgaccctgttttacgagttttctacaacagcatgtctatgtttacaatcgggagaaaagtggtttttgcttttgctgtttaatatctaacatgtgttgtgacctgtccctggccaacttgttaggcgtggagataacatagttgaatgagaggtggacagttgctctcctcagcttccgtgtggggtttgccccttccctgtgttaatagttgctttaccaaaacctttcaggactttttttttttgagacagggtctggctctgtcacccaggctgagtgcagtggtgccatcatggctcattgcagcctcaagcccccggccccctgccaggctcaagcaatcctcccgcctcagtctcctgagtagctgagactacaggtgtgctccaccacgcccagctaactttttatttttttgtagtgatggggttatcaccatgttgcccaggctggtttcaaactccaggacacagtctgtcctcctgcctcagcctcccaaagcgctgggattgcaggtatgagccactgtgcatgaccaagactcttcaggatcctaaatggtttcagcaacaaacattgtttagttatgtaactcagaactccagtatggacatactatgtgatgtgattttattattgcttatatgcttttgtggttttattgtttgtttttctgtttgtttgttttgagacagggtttttgtttttgttttgagacagggtcttactctgtcacccaggctaaactacaatagcatgatcctagcttgctgcccccttgaactcctaggctcaagcaatctttctgtctcagactaccaagtagctaggactacaggcatgtgccaccatgctatgttgtctggctggtgttgaatacctggtctccagtgatcctcccacctcagccccctgagtagctagcactacatgcgtgagtcatgcctggctaattaaaaaaaaaaaaattaagagatggggtcttactatcacagcgtgaatcccaaaattggggttcagtctgggaggccacatgggttcttggcttcccacaagaaggaattcaagagtgagccaacaaagtaaaatgaaagcaaggttattaagcaagttaaggaataaaaggggggctactccataggcagagcagtggcatgggctgtttgattgagtatacgggtattccttgatcatatgctaaacaaaaagtgaattattcgtgagttttctgggaaaaaggtggggagttcccagaactgagggttttcccatttcagacaatatagggtaacttccagacattgccataacatttgtaaactgacatggggctggtaggagcgagtgtcttttagcacaacagtgcattatcattggcatataatgagctgtgaggacgaccggaggttgctttcatcgcatcttggttttgatagatttgggctgctgctttactacatgtcattttatcagtggtgtctttgtgacctgtaccttgcaaaccagtcctgaagaactcttgtctcatcactgtgttgtccaggctggtcttcaagtgatcctcctggcttcagagtgatcctctcacctcagcatcccaaaatgctgggcttgcaggcttgagacactgagccagaccctgtttattcttgaattgtttccagtgaatatatctcatcgtctccccccaaaaaaaggttgcaagtttttggccaggcgcggtggctcacgcctgtaatcccagcactttgggaggtggaggcgggcagatcgggaggtcaggagatcgaggccatcctggctaacacggtgaaaccccgtctctactaaaaatacaaaaaaaaaaaaaaattatccaggcttggtggcgggcgcctgtagtcccagctacttgggaggctgaggcaggagaatggcgtgaacccaggaggtggagcttgcagtgagccaagatcgcaccactgcactccagcctgggcgacagagcaaagactccgtctcaaaaaaaaaaaaaaaaaggtggcaagtttttataaaaagagaaaaatcattcttagtatttctttaataccctctacattgacctcactggtgcaaaaaatattagtttgctggtgaaaattcacctcgagttactaaatatctaactttcccataactaccatctgtttgtctcttgtggatctgtttgcctaatatttaaatgacccattcttccccacttttacgaaaatagcattaattcccctttcactattcacacttccttcatcgtcacagtttgaccagcggtccagggtttatgatctcaagcatggccatatatatctatttcacttaagactctggaaagagcataaaatcagatgtaactgtttcctatttcatataatagggaattc

(The sequence listing continues in the following parts.)
